United States Patent Application Publication US 2026/0258423 A1 - sequence listing, part 65

SEQ ID NO: 301568 - DNA, 83257441 bp, Homo sapiens (residues 55,504,983-57,639,789 of 83,257,441)
  source 1..83257441: mol_type = genomic DNA
ggataaattcctcgacacatacactctcccaagactaaaccaggaagaagttgaatctcttaatagaccaataacaggagctgaaattgtggcaataatcaatagcttaccaaccaaaaagagtccaggaccagatggattcacagccgaattctaccagaggtacaaggaggaactggtaccattccttctgaaactattccagtcaatagaaaaagagggaatcctccctaactcattttatgaggccagcatcattctgataccaaagctgggcagagacacaacaaaaaaagagaattttagaccaatatccttgatgaacatcgatgcaaaaatcctcaataaaatactggcaaaccgaatccagcagcacatcaaaaagcttatccaccatgatcaagtgggcttcatccctgggatgcaaggctggttcaatatacgcaaatcaataaatgtaatccagcatataaacagaaccaaagacaaaaaccacatgattatctcaatagatgcagaaaaggcctttgacaaaatacaacaaccttcatgctaaaaactctcaatcaattaggtattgatgggacgtatctcaaaataataagagctatctatgacaaacccacagccaatatcatactgaatgggcaaaaactggaagcattccctttgaaaactggcacaagacagggatgccctctctcaccgctcctattcaacatagtgttggaagttctggccagggcaattaggcaggagaaggaaataaagggtattcaattaggaaaagagcaagtcaaattgttcctgtttgcagatgacatgattgtatatctagaaaaccccattgtctcagccccaaatctccttaagctgataagcaacttcagcaaagtctcaggatacaaaataaatgtacaaaaatcacaagcattcttacacaccaacaacagaaaaacagagagccaaatcatgagtgaactcccattcacaattgcttcaaagagaataaaatacctaggaatccaacttacaagggatgtgaaggacctcttcaaggagaactacaaaccactgctcaaggaaataaaagaggatacaaacaaatggaagaacattccatgctcatgggtaggaagaatcaatattgtgaaaatggccatactgcccaaggtaatttacagattcaatgccatccccatcaagctaccaatgactttcttcacagaattggaaaaaactactttaaagttcatatggaaccaaaaaagagcccgcatcgccaagtcaatcctaagccaaaagaacaaagctggaggcatcacactacctgacttcaaactttactacaaggctacagtaaccaaaacagcatggtactggtaccaaaacagagatatagatcaatggaacagaacagagccctcagaaataacgccgcatacctacaactatctgatctttgacaaacctgagaaaaacaagcaatggggaaaggattccctatttaataaatggtgctgggaaaactgactagccatatgtagaaagctgaaactggatcccttccttacaccttatacaaaaatcaattcaagatggattaaagatttaaacgttagacctaaaaccataaaaaccctagaagaaaacctaggcattaccattcaggacataggcatgggcaaggacttcatgtccaaaacaccaaaagcaatggcaacaaaagacaaaattgacaaatgggatctaattaaactaaagagcttctgcacagcaaaagaaactaccatcagagtgaacaggcaacctacaaaatgggagaaaattttcgcaacctactcatctgacaaagggctaatatccagaatctacaatgaactcaaacaaatttacaagaaaaaaacaaacaaccccatcaaaaagtgggcgaaggacatgaacagacacttctcaaaagaagacatttatgcagccaaaaaacacatgaaaaaatgctcatcatcactggccatcagagaaatgcaaatcaaaaccacaatgagataccatctcacaccagttagaatggcaatcattaaaaagtcaggaaacaacaggtgctggagaggatgtggagaaataggaacacttttacattgttggtgggactgtaaactagctcaaccattgtggaagtcagtgtggcgattcctcagggatctagaactagaaataccatttgacccagccatcccattactgggtatatacccaaatgactataaatcatgctgctataaagacacatgcacacgtatgtttattgcggcattattcacaatagcaaagacttggaaccaacccaaatgtccaacaacgatagactggagtaagaaaatgtggcacatatacaccatggaatactatgcagccataaaaaatgatgagttcatgtcctttgtagggacatggatgaaattggaaatcatcattctcagtaaactatcgcaagaacaaaaaaccaaacaccgcatattctcactcataggtgggaattgaacaatgagatcacatggacacaggaaggggaatatcacactctggggactgtggtggggtggggggaggggggagggatagcattgggagatatacctaatgctagatgacgagttagtgggtgcagtgcaccagcatggcacatgtatacatatgtaactaacctgcacaatgtgcacatgtaccctaaaacttaaagtataataaaaaaaaaaaaagaaaaaaaaagaatggtaaaaagaccactggctttgcgcatgcgcactttacctcttccgaactgcaattctcccattagttcagtccatcagcctgcggacttaagccaggcgtcgtgctgacatttaaagatgattcctctttcgtcataagaagaaacacagaacatcatttgataaacataaaaattaaagagctctgctggcagtccctttacaaggcactggagaaaccctgggttgggcatgactggtgcttttaccaacacaagcctaagggacccctctggctgctggattagccctaaatgcaaccatttggtttactggtgtaaatatgagctattagtgtctggtggtgcattagagtggccccaacctactgctttgccttgtaacaaacacacaatgaaaagagcagagttgagtgttgtatttacactgcctgtctaaatctggtttcatagcccaacatccccctcaccccttccacaaggatactcattaatgctgccacaaccaagttagtgccttgttttctacctctaagagtgcaaaacgcaataaaaaggtgtcagtatttgtcctgaaaacaaacaaacaaaaaaagaaatacatacattcaatatatatattctctctatatattcccgtaaaatatatacatattttatatatatattcctaggaatatatatatatatatatatatatatatatatatatatgaacctgcccttttcttaatgtgagcttcatctgaactaaccttcttatttctttccctttcatgggaatataagtatataatatataaagggtaggttcttagaaactgcctgtgaatttatggtgtttcttcattcagtttatattttcattataaaagtgaagatggtggctgagcgcggtggctcacgcctgtaaacccagcactttgggaggccgaggtgggcggatcacctgaggtcgggagttcgagaccagcctggctaacatggtgaaaccccgtgtctactaaaaatacaaaaattagctgcgtgtggtggcagatgcctgtaagcccagctatttgggaggctgaggcaggagcattgcttgaacccgggaggcggaggttgcagtgagccgagatcgtgccattgcacttcagcctgggtgataagggcaaggctctgtctcagaacaaaaaaaaaaaaaaaaaaaaaagtgaagatggcttcttgctcataaagaaaacaaatttcctctgaagggttttcaatatagtttttaaatcacatacttaagagaaaatataatcttctgataaaataagaaacaaattaaattaaaaataaacatcaaaacctgaaaacaaagtaactgggattatcttcacgtttgttacagctacttaacaatccaaaggcaaaacagtgctcattgtcaaagctggcagggcaggctggccaggccctcctcttcagttttctacaggagaaaccaaaattgaatttctcacgttttcttcacatgttggacaccatcagaccttcacaaccaatggactctaattattttgctttcaagctttgtttttgttatttcttcttctaaaaggccatctcctgtcctacccttcaagattccaacatactttggttcttctggaaaaataactacttatcttttaagacaaatcatcttatctttggtacctgagtctaagatgaaattggccattcaacattattcgaatatttcttgagtgtcttctgtgtgccagacactcgtgtctctgttgactcctgcatcctatgcagacttctaaaagagcatctgcaaagctttcttatctttcattgtctaagtcatgcctgaccctgcttccttctgttgggcggcaaagatcatatggcagggtcatgacactcatttctctttatttccacacaggtcctgatggaaagaagaggttcagtaaatctcaaagtaaatacatacgtttctctgagctcagggaagggagggttaataaaaatacacacaatggagataataattcaaaaattttggaaatagactaatgaacaggggaaaaaacataccattcaacatcaacaaagagagtgaagggagagcaggcagtgttctggggacagatacaccaagctgtggggtctcagaattctttcaatgagttttcaataactttgtattggatcaggccggatttgaggattggagattaaattttttatgaggcatatggaaggaaatattatcagtgatcatcatcatagctaaccctgtgtgtcaagaactgtctcaagtgcttttggtgaattaactcatttaaatagccccaaaagcttagtggtccaatcactatccctgagacacagaggtggctcaacttaaccatggccacacagctagcaagtagaagaggcaggatttgaacccaggctccaagctttgttgttttagttgtatgcattccttattctgtcttggagttgggaatagaacgtgaagagctggtaggtacagaaataataatgttctgaagtctgaacaagttcaatggggttgccttgactgggtgcagcagctcacatctataatcccagcattttgtgagactgaggcaggaggattgcttgaggccaggagttcaataccagcctgggcaacatagtgaaaccccatctctacaaaaaaaagacaggcgtggtgtcatgaccttagagtcctagctacatgggaggctgaagtgggaaggttgcttgagcccagttcaaggctgcagtgagctatgatcacgctgctgcacttaagcatgggcaacagagcaagactctgtctcttaaagaaaagaaaaataacaacaaaaaactggttgccttggaaagaaagaatttgcaaagaatagactagactggagttagtctcattccttatcacacacacgcacgtgcacgtgcacacacacacacacacaatattgcatcctttctcaaaagtcattctctcctgtgagttgcaaggacagcaacatcagaaatgtaccagtaaccaacttcattatactacagcattgctgacagtttgcatttggagaatttgactaaagaccactttgggcttcttaccttaaacagttacttttgtcacaaagaaggtgacgagaaaacagcaagtaagacagagctctcacttccttcatcaagcgggatacatgtgctgagagaattggagccacgatagggagcagtttgtctctatggaaagtctagtggtctctccccagtgtcccttagccagcctcataccatggtgcttttctttcctagtggagcaggatcccccaaagaaaggccaggcccctttggccagtggggcccagcgacacttgggtgcatcaccaccaaccggatggagggctgggcctcgagagtggcctcgggcgcgtactccttactgggatccttgcctcggcagtcgtatagcacgcaggagatgaggaagaccaggagcaagatgacgtagctcgcaactaggatgatcaggttcaaggtaacagggtcgatctccaagtagaattccatcacttctcccacggtggagaagtgggtctagagaaaggcaattggggtcagtttgggcattgcagagagcagatcttagagcatcggaatagctacattggctctggagtaaaaatacattaatccctactgctccaggagacctcgaggattaaagctgctcggtttaataacttaagcttgctgttaataccacagccaccaaaacacagaagctgtctgtcatcagttcgcctacacagagagagaaagagagagagagagatggctcatgagttactggatcatggtatataagtagagcattcacataattcagcatccacacaggcagtttggtgagcaaaagtaagtgttgttaataagcactccatgatgacagctaaaaattggattgtcctggacaattgtgctgtctttgtataagggatgtttagtgccatgtatggagtgatttggaagattaggtcagtaggctttggaagtaaatgtgattcttcaacaagaagaagatactagtgcctgatattttcaccctttcttcatttgttgccatgtttctcattagttaattcaaaactactttttgagtacttacttcctgtgtttcagacactacactaagcaaaggggatatggcagtgataagacagagaagcaggtagtctagcaggaaagatagcctttaaacagataattgcacaattcgccatttaagaacagtggaaatcagtttataagggacaaatagagggtaagaggacagcgtgtcccagtgtgggtcaaaaaagcttccatgcagaagcaacatttaacctatgacctgaaggataagtagaatttagctaagtgagaagagacagggaagattcttctagccacaaagaactgcatatgtgaagacccgaagagaaaggagcctggaaaattgcaagcactgaaacaagggcagtgtgactggagcataaagagaatgggagcacaaggtgggagaggtagacaggggccagaaggcacaggcacttgtgggccatactcaggactttagatatgatcctagagcaatgggatgccattgaatgcttttgcacaggggagtgacactactgaatttgcattttaaagagattcccaaaggctgcctcaaggatgcagaaaaacaagcaaattgagaggaagatcagatactgatcggattacagttattccttgatgtacaaatcactgtcctgcctcagttgtagcctggtcccaatagtcccgcataggctacttcatgggcatgtgccctgtgcagctgcacaacgttccattctcagaaagagctcacacttggtttaatgctctgctgttgccatcttgaaattcttaacttttcaactttgcactgggacccacaaattacgtatctggtcttggtctcatatatgtatttttggccagctagggcatcagtagccttttctccaatagctaataggactttttggatactcctagttaaaagctgaagttcccaaaggtctgctggtttcttagtgttaagcttcaatgggctagtgtcttcctgtcagcctcctttatactgagcttccatgggaacctgagcatttgaagatgttgtagtatggggttcttatgcatctggagacgtttttccaaataatatcgtccatgattctatggtcctggactaacttatggaattataatccagaagatgcatgattctgaaacaccatagatttagggtcagccttattggaatctattgggtctcttttgaatacagatacctggatcaaccctagatctactgagttagaatctttgggactagagtctggggatctgtattaataaaaatcttcatggataattttgatctgcaaccaggatggagaatcatggctataaaagtagaaaaaaaggacgtgaagaaaatgggccaatatgcggtcaccagggctttggtgatctgtgaagagctattccagggggcattcaacacagaattcaacactgtccaaggttttaagtccgacagattcagagaattaattttgtgcttgcaaggacatagctttttcttcctgaaggcagatctacaggaaaagtccatttataattggaaagtttctggtaagcacagaatcacacagcaagtagagttgtctgttgcatctgtaagtcacgtgcaatgcaccagacagaagcgaggctttaaaaggcagcattatgtaccagatgcctactttcttttgcccactcgggactctagattcgtgacttctatagtaaactgagtctggatagcccaggtgcctccatgtaacaatatttaggggagttatttggtgactttaaatagatgacacaaggattggttaaaattgactctgaaatgagaactacatatagtttagtccacattaaattaaactgaaatatatgcaacagatctgctctattgagtggagttttcatatcagatctaggtttctctgtgtaatggtgataatcattaatcatggtgagtgatctggtctggcctgtcttcttagattgcccccattctgctgatacccgtggtgtcccggaatgttttgttcaaggctattgtctttggttccagtatcttatttctattagcagagagttttttgtttctgtttccaccagtgctcaaagttcatttgaagtccagtctcatgaaggcttcacttccttgcaatgtcttcggtgaaatgctgggtgcttgttttacttaattaacctgggtggctcctttattcatactggggctaacctcacccatctttccttcttttgctgtctttaaggaactttcctctggtgccatctagtggccaaagcaggggctgctaaataaagaaaaaaacttggcaataggcaaactgggacggatgacagggtgacataggtaaaaacaataacaagctgcatttcagaagaaccccttgaggtagccttgacatactaattccttcgtttattacaaatatgaattgtgcacttaccatatgctagcaaggtactaagcactttagagcttgataatgtgatactgaaagcacactgtataacaaatgtagagctcagaggaaaaaaggaattatcaacccaattttttaaaatgagaaaattgaagcttaaagaggcagtggaattgaatgagcttattctcattccctttttccctctcaccctctcatctctcttttctactgcataaaatatgaataaaacaggtacatgcataacttattctatggagcattcaagacccattgggcaggtattctatgggtcttcagttgtttacatatttacttgcagtgtagttcattttgatggctggcctggaatattacttaataataccagataaatatgtgtcccatataaatacatttttaggtaagtagagtttattacttaaaacaaacatatttttgtatatcaactattctggatgaaaatttatctctggtatttcagagtgccttgcttccttgataaaatatggtatcccaaaagtcttagtgccttagagaagtgtcaacttcagaggtaaaaatgttataaacttatttaaaaaagcattgggagtttgattatttcacagttgaggacattcaggcacagggacgtgactttctcgagtccaaacagatagtaaatgacagaagcaagacattaaagcaatgtttttgaattctagtctagtgttttttttttttttttttttttttttttgcgctggaactattgactagatagaatggaaagtgaaagagggaaagatgctgtagatgctagaaaagtgagaaaggcaataatgaacaaaaccaaatgctagccatctagattttcaaaagtccacttgtccctcaaatttatgctaagaggacataacctaactttcaacctaccacccttctcagcctcctacttgtaatcaagcaggtggctcacttgggagcctcacctggcagcctctggagaaatactgccatattttgtcgcaacttaaaagtctttctttccatctatactgggttgaataatgtctcccctcaaactcatccacctggaatctcagaatgtggccttatttggaaatagggtcttggcagatataattagttaagggtgagatttcactggagaagtaatgtgcccttaatccaatgactggtgtccttataagcaggctgtgtgagggcacagagacacacagggaggagatgctatggaaagatagagagagatcggagcgagacatcttgcaagccatggaatgccaaggactgcaggccaccaccagaaactggaagacaggcctgggacagaccctccctcagagcctccagaagtaaacaaccctgctgacatcttgattccagactttcagtctccacaactgtgagagaataaattccattattttaagtcattcattttgtggcattttggtatagcagtcctaggaaactaacatactacctatctaatgtgtgaataaaaccagatgtggcttgcagcaaaccaggaggtataccaagctcttttagatcctcttctattttattttggtgcttgccccttatagacttgagcttggttcctggctctttcttctcaggtatggctccatgaagaaaacgcatgggatgaaagaaaattactgtatgtaaaatttacttctataaaaaacaaagaccttcagtttaaaatagcacttggctggaagcccctgatgtagccttttatatcttcccagtaaaattcctcagaagacacagaaaaaaatataaaaacctacaaaacaatgaaaaacaatgtagctagggataatatttttaagatgctatggtgttggttctccctctccttcccaagacttatttgaaccaatttctcttctccttcatcatccaagatttctaagggtattgactctcaggagagacacagcctggaagagtcaaattcatcattcttgagctcctttgtaaaattctgtacgcttataccaaagtccatagactttgagccaggcattgtgggggaaagcaaaggccatttttagaactacaaaatattggctttgtgtatcaagagaccaaaagcataaagtttatataacaggccaaaatgtaggaaagagaaagtgaggaatgtgaacagtcttccttttttttttttttttttttttttgagacagtctcactctgtcacccaggctggagtgcaatggcacagtcttggctcactgcaaactccgcctcccggtttcaagcaattctcctgcctcagccccctaagtagctgggattacaggcacctgccaccacgcccggctaattttttgtagttttagcagagatggggtttcaccatattggccaggctggtctcaaactcctgacctcaggtgatccacctgcctcggcctcctaaagtgctgggattacaggcatgagccactgcaactggccagccttcctattcttgaggaagatttgaaaaaggaattctaaggggaggtgacaagagattagatgttagtgtgtccctgagaagacgcttctccccaacactccctataccatcttttagaagaaagactatataatcacctagatgggcactccaaggcagaaagggttcagctttgattacatagtatattcttggaagactgccaggttcctggagaagtctcatgccctatataacactgaatggcaatatgctggaatagtagagaacaatgtccaagaaaggtagctaactggagaaaccagggctaccttactattgaaggtatactaagatggtgcaaagaaaataatggagagtttctaagactctgaaataggattgagatacaaaaggtaagagatgggcctggcatgttcgctcacacctgtaataccagcactttgggaggccaaggagggtggatcatctgaggtcaggagttcaagaccagcctggccaacatggtgaaaccccatctctactgaaaatacaaaaattagccaggcatggtgctgcacacctgtagtcccagctgagggagtcccagcttgggaggctgaggcaggagaatcgctggaacctgggaggtgaaggctgcagtgagctgagatcgtgccactgcactttagcctgggcgacagagtgagactctgttacaacaacaacaacaacaagttgagagatgcctgattgaaaagacttcatggttcttattaccaaggtcacagagtgaacaactcgggtatatggaggtatcatttagtgatgtggatgactgaaggaaagtaaatttgggaggtgaatcaagagttatccttaggattaaattggagatggtgagaagacagctggatatttgagttcagatcttagtggaaaagtcagtgttgcaaatatagattttagacttatcaatatataggtaatatttacagtcatagaactgaatgagatgacattaaaagaaggtgtacattaggaagagaagaggaataaggacagagcctagagtatcccaacatctaaatgttaaacagagaggaagaaatcaacaaataataaagaggagtgaacagagagataagaggaaaatcagaagcacttagtgtcatgaaaatccagggagaagtatgtatcttagtccattttgtgctgctataacagaatacttgagactggataacttggcttacagttctggaaaatgggagatctaagattgaagggccaccatctggcgagggcctcgttgctgtgtcatcccatggtagaaggtaaaaggacaagagagagcatgagagcagagcaggacagggtgaagagggctgaatttgtcatttcatcaagaatctactctcttgataactaacccactcccacaataaaaggattaatccattcataaagacagaaccctcatggccaaattgcctcttaaagtttccacttctcagcactgttgaattggggattaagttaccgatacacgaactttggggaacactattcaaactatagcactgggttcaacaaaggcagtgaccaactaggtttaaagctgctgagtgatcgatcaagtaaaatgagaatagacagttgactgttagttttgagattttgctaaaattagaaggggttttcatagggtgggatgagaaagaaaacccctaaaaataggtggagaaaagaaggtaaaaaagtggaccgtgagtaaaaataattttgaggagtttggttgtgaaatattgaagagaaatgggaaatagctagaaagcagggtgtcagtgaaacaaagttgtttcgtttttgttttagatgagtgatatgaaagcatcatgcgagcccatgggttgtgagttgtgaaagggcaagtgataatatgagagagaaaaggaaaagttgtatgagagagaaaaggataatatgagagagaaaaggaaaagttccttgaacagcgatgaaatccagaggaaacgtggaactagaggtagggacaatgcttccatttatcaaaagagaagaaaaataagtaggtttagaacagctttggtggtgagaatatgaggtttgtttcatctgatatttgggttttttttttttttctctcaccgaggaatgagttaagatcattagcagaatttgagtggaggaaatgtactgtatattttaaaagaggtgaatttttgaaatagttattttgacaaaaaggaagacaaatatcctagagaagtagggtaggagtgctgggcagtgttgaattcccctttgacatgggttgtcatgaatttaaattgagatagtagttcaaagtaggcagatagtttggttaagcagattggaggttagtcagtgagcagaatagaaggttggcgcaagagggtgttaggaaggaaatagttctgttactacaccaaaacctgtacactgggtaaggagggatatgagggcatgtggtgtgtgggtggaatgtggcgggaaattgtgataaatggtggagtgagtgcaatggtggtccctgtgtggtcaaagagagttggagcagagaagaggagttggcacactgggaggactggcagtggtgcttcaagaggggtatgaccggaattgagattctgaaattatttgcaatgacaagatgtagggaagaccattagagtgtatagcagaagggcatatctttggagttgagataataaaaaatctgcaggggcagagcattgctgaaattgtctagaaggacaaaagtgtaagagggaagagaatgaggtgagctaagtgctcaagtccttggtaagacaatggtggtcaggaggttgctagacaattgtgaaaagaagaggcatttggcgagtaagtctgacaacatgtccttcactgatgtatggacaccacgccagctcaggattttgatggagaaaggtgaagaaatgtttagaagcagctgtttagggttgtaaatcacctacttaaattgtaggtcctgaagtatgtgggtatataaattttttgtggttgctctaacaaatttcgtggcttaaaaaattggctatttattctttcatgattctagaggccaggagtctgaaatcagtactactgggccaaaaacaaggtgttggtgaggctgtactcccctcaggggatcaagagggagaagttctggtccttgctgttttcatcttctcatggctactggtattgtggtcgtatcactccaatcgtcaaagccagcatcttcaaatctctctctgttctgtcttcacattgccttctcctctgtgtgtgtaaaatctccttttgtttccctcttataaggatacatgtgatggcattttgagcccacccagaaaatctagtagaatctcttcatctcaagtatgtagtaggcacaaatttctcttttatccttcacaatttcatggatagaaaattcattctaaccaccaatcttagcaacctctagcataaatttgttttcttattaaatagagaactttcacactttcatttaaaggaagcaatttatggcttctgtttggcatatccgaattgctggcatcactactcttgcactttggggctaagtaaaataagggctacttgaacacaagcacagtgataaagcaacagttagtctgaaaactgagatggtcactgagtgactaatgggcaggtagcatgtacagtgcggatacaatggacaaagggataattcaggtcccaggtagggcggagtgggacggcatgagattgcatcaggatgctcagaacagcacacaattgaaaacttacgaatagtttatttctggaatttttcacttaatattttcagattgtgtttggcagaggttcactgaagctgtggaaagtgaaactgtggataagagggaagccactgcaatagtagtaataataacttttacttaacaaaaattatcttgaccggcaggtgctgtggctcacacctgtaatcccagcattttgggaggccaaggcgggtggataacctgaggcccgagaccaacctggagaatatggtgaaaccctgtctgtactaaaaatacaaaaattagccaggcgtggtggtgcacccttgtggtctcagccactgggaggctgaggcaggagaatctcttgaatccaggaggtggaggctgcagtgagctgagattgtgccactgcactccagcttgactggagtcttgtggcagagcaagattgcatctcaaaaaaaaaaatcttgacctaacatctcagaatgtatgaaagaaaagcaaggaaggaaaagatgagtagagctaggctaacttctttgtcttaaataaggaaaacaaaaatgacaccaattcctcttaacttcagcaattagagagaagagttttgtagcttgcttttgaaagtattgacaagaacccttacaaaaaataattgcatcatgctagctaccctgttttagggataacaaatgtgatcacttccctggtctgctttcctttctgctgctcttgttcccttttctggttagaaatgtttcacacccatgatgacattctgtatttccttatctgaatatcataccatctggaggcattctgcattccttttggctttggactttttataacctgtgattagggtatagatgaataaagatgtctactttatctttctctagtttcctatgtaggatttatataatgttagtgttcatttatttgatgtgtagattggacttgggaggacatgcgtggattttagatgtatccttgcctccaagatgtagagaatgctcagatgcaactaaaactttgacagtgttaattgtcaggatgctgaaagcaatccggagagggaggtgcaagcaccatatggaatagcagaaaatcctgggggctctacatttaaaatatattgggaatgcaaacttctcttaccatcttcaccgctttgactttttttttttttttgccaacccactcttacctcccaacttgattaatgcaactagcatacctgcttagatttctccaccacccctcacttagtctattttcaacacaataacctgagtgagcattttaacacatgtcaaaccatgttattcctttgctcaaaaccttctaataactccccatttcactccatcaaaagccagcattcttacacgggcagtaaggcactgcacaagctggctaacctacctctgtcctctcattttcaaatactttctccctcacctgttctactctagccacttcggtgttttttggacactctaagccactaccatttcaggatcatagtacttgcatagtacctgttctatctacatgagatgttctcctccgattatctgcatagctggttccctgcttccttcagatcattgctcaactatgacttttatggctttccatgaccattccttataaaagaaaaacctcctgtattagtgtgttctcacatcgctaataaaaacacacctgagactggataacttataaaggaaagaggtttaatggactcacagttccacgtggctggggaggcctcacaatcatggcagaaggtgaatggggaacaaattcacatcttacatataggcaggcaagagagtttgtgcaggggaactcccatttataaaaccatcagatctcatgagacttaatcagtaccatgaaaacagtatggggcaaactgcccctgtgattcaattatctccacctagccctgctcttgacatgtggggattattacaatttgaggtgaggtttgggtggggacacagccaaatcatgtcacctccatccctgggccactccttttctcctttattctgcttattttctatggcacttgtccccatctgacatgttcttagtgttgtcatgcattttgtttgtgatatgactctcccctctagaaagtaagttccatgaaggcaggaagtttgttgtattcattgtatccctgtacacgggcccagagcatggcaggcacattctaagcattgaatatatatttggggaatgaataagccgttcacaaacacatctcttccaatattaggaaataatggtgataaaaaaagatcttggcaggggattagagaaatattataatgaggaaagaggtcctagtttaatgctgtgggctgaattgtgatttccagaattcatatattgaatccctaacctcagaatgtgactgtatttggagatagggcctttaaagacatgattaagttaccatgaggccattaaggtgtcctttgaagaagaggaaatgagaccacacagggagacagcagggatgtgcatactcagcaaaaacaccacatgaggggctgggtgtggtggctcatgcctgtaatcccagtactttgggaggctgaggtgggcagatcacgatgtcgggagatcgagaccttcctggccaacatggtgaaaccctgtctctactaaaaatacaaaaattagttgggcatggtggcacgcacctgtagtcccagctacttgggaggctgaggcaggagaattgcttgaacccgggaggcggaggttgcagtgagctgagattgtgccattgcactccagcttgggcgacagagtgagactccgtctcaaaaaaaaaaaaaaaaaaacatgtgaggacaaagcaaggaagcagctatagacaagccaaggagagaggcctcagaagaaaccagacctgcagacatcttgatcttggactttccagagcctccagaactgtgagaaaaataggtttctgctgtttagggcacctaatatctggtattttgttatggcagtctcggccgactaatacatccagcttcagggaaaagtaatattttgagttgggctttcaaattgcctggctctatttatatgaagccgaatggaaaacataagctcattaaaagtttcttttttcagaaaaattgtttcaagttttgaggataacatattaatatctaacctcctaagaaagtttttctttttcttttctttttttttaacttttattttaggttcaggggtacacgtgcaggtttgttacataggtgaactcatgttacagaggtttgctgtacagattattttgtcacccaggtactaaccttagtacctaatagttattttttctggtcttctccctcctcccactctccaccctcaagtaggctccagtgtctgttgttcccctttgcgtctataaattctcatcattcagctcccatttataagtgagaacatgcattatttggttttctgtttctgcgttagtttgctaaggataatgacctccagccccatccatgtttctgcaaaagatatgatctcattcttttttatggctatgcagcattctgtggtgtatatgcaccacattttctttatgtaatctgtcatcgatggacattagggtgattccacgtctttgctattttgaataatgctgcagtgatcatacacagcatgtatcttcatggtagaataatttctattcctttggttatatacccagtaatgagattgctgggttgaatggtatttgttttttagctctttgaggaatcaccacactgctttctgcaataggtgaactaatttacactcctaccgacagtgtataggcgttttcttttctctgcaacctggccagcatctgttattttttgactttttggtagtaactattctgactggtatgagatggtatctcattgtggttttgatttgcatttctctagttcactaaaagtttctaagggtccagttgtttcaggaagtccattattactaagagaaaatggtattctattactagtaacaattgtataaagctagtgaaaaaagtgccctattactagtagcaattgtataaagctaggattgacttcaatcctggaatagtgaaggatcacctaagaggtgggctatcattacattgtcatcatcataattcacatagactgagagcttactatgtgctaagttctcttctaactgctttacatgcactgagccatccgatcctcccagcaactctatggaagtttatccctccattttacagatgagaaaactgaggcacagacaggttgaggaagttgcccaaggtcgtatgtttttatgtggcagagccaaggcttgaatctaggcagtggcaatggagcctgcacctgtaacttctatactgtacctccttttatatatgttcccctgtctacagaaggctttcttctgtaacattgagatgtgctagttcttagcttagccttctgttagcaccaacctacttttcagctttattttcattattcacatatatttggaaaaactgtgtcatcccttgtctctccacttttccttaactctccttcccattaccttgcctcattgattaattgattgattgattgctgttctagtttcttatgccttctttgctcatccttacctaaaatccatctttaataccaagtccaaatcctacctcccccataacattttacattacccttctcctctgaaaatttcattgtatgcacaactaatttagaattaataatgtacttcccaattaaaattcttttgatgactgaatattctatacaaatcttcctaagatttaacttttcaccagttttgtgttgcatcttcaaaatagatttaattcactgaggatagggacaaaatatctactatatatgatactttgtacataatgaaagtgtgatagacatttattgattttttttaagacagggtttcactctgtcatccaggctgcagtgcagtggcgtgatctcggctcactgcaacctctgcctcctgggttcaagtgattctccagcctcagcctcctgagtagatgggtctacaggcaggcgccaccatgcctggctaatttttgtatttttagtagagatggggtttctccatgttggccagactggtctcgaacttttgtgctcaagcgatccgcctgcctcgacttctcaaactgctgggattacaggcgtgagccaccacaccaattacagagctgtaattgatttgttttgatttgggaaaacaaacaaaaaactggagatagagaaaggaaacaaatgtggccaacaaggccattctaatttatagctagcaccattttgaatgaattatatatgttagttcctttaatctttacaacgtttctctaagagcaatactactattattattattaattatgattattatttgagatggagtctcactctgtcctccaggctggagtgcagtggtgcgatctcggctcactgcaacctccacctcccggcttcaggcgatcctctcacctcagcctcccaagtacctgggattacaggtgtgcgccaccacatctggttatttatttattttttattttttgtattttcagtagagatggtgtttcaccatgttggccagactggtcttgaactcctgagctcaggtgatccacccgtctcgacctcccaaagtgctgggattacaggtgtgagccacctcgcccggccgagaaagactattattatccccatgttatagatgagggaaatgaagcctagaggtactatgcagtttgtccactataacacagtgcaggcagctgcagtctgcctcctcgccagcagagggcattaagagaccatgaccatgtgtaagtctaagatttatggtccaattttccttcccatcaggatcaggaaatggacaataatggcttttggatgatcatggagttttctcattttccacttctttatatcaccagtgacattctttgggcgacaacagaaaaaataagctaattttttcccacatgaccacacacagtttgcctctggctcatttctttcccctccccacactctcagtctccttccccacttcaaggaactgttttcccctataataatgcatttgctggaattatctgtggggaatgtccaaatcccaggataccaccaagcctcagggctcaacggtggctctactcccctcagctgttggctctcagcactcttaagatcattttattattgcaagcctgaaaaatgaaattacttcggaagaagataccctcccagttctgcaatgcactcaaaaagtgtcttttggatgatcttttgtttggcagatttgtagtttaaaatggtggtgggggtgttttgtagaaacagaatgtgattctgctctatgtcctcatgttattgaccatcttcaaaaaggatttttactgctagaatgtgagaaaaagagaaaggaaaagttatatggaccaattatctctggctgctaaggaacattcagagatgaaagctgccacagccagaaacaatatttctctcctggtggggattctctggtttcctcagagtccttaacttctgagaatatggtttaagtagcaagaattttaaatttagccaagatctagtgagccatagcttctagaagtcagagtacatcagaaaaaggagggactaagaacatttggcgcaatccactgattttatgatcaggtcgctaggcctgtgggatccagtttttctcagtctgtggctctttccctcacatctactcttattgtcaactaaagtgacctgtcagggaaactgtgttttctttataggtttgcatgagggtgacactataggcaatttgaagtatctttttccttctttttataggtttgcatgagggtgacactataggcaatttgaagtatccttttccttcttggagagaaacactgcatgtgcacgcttaccaagagagggcaccctctgagcaggaattttctcttgtagtccattttacagtcagaaaaaataggctgccactctgcagatcaggggagaagagaactatcaacttaggtttgaacaccttgtgtctgtcgtcagaaagcattaaacttagcaggggtggcagaaaccagggtctgcctacttagccccagaagactaacacctacccctttttctgcacctgcgtgcagcttcatatgcgtgttcatgctggccttttcctgaaatgcctttcccgttcttcctcctctggaaaactcctagtcactggtcagagtcttaggttgcacccttcacttttcagccttctctcctttatattccagaacttttcacatgccaggattagagcacatattacccattattttagtgtgtcttacggtttgcaatatgaagcccttaaaaatctacattgtgttatctcattgttctccaactgcctagcctcatgtgaggcacaataataaatgcctgacaaatgcttgttgcctatgtgaacacataaatcaataccattgctcacgattatttactaaccaggataacaacacaggtgggtgggattattcaaggaagttcttttttttcaatttcatataatatatatttttaaagatagggacttactctgtcacccaggcctgagtgcagtggtgcgatcatagctcactgcagcttcaagctcctggtctccagtgatcctccagccccagcctcccaagtcgcttggattataggcgcacaccaccaagcacaagcacagctattcaaggaagtctttttttttcttttcttttcttttttttttttttgagttggagtctcacttttgttgtccaggctggagtgcagtggcacgatctcggctcactgcagtctctgcctcccgggttcaagcagttctgcctcagcctcctgagtagctgggattacagatgcctcccaccacacctggctaatttttgtatttttagtagagacaggggtcttaccatgttggccacgctggtctcgaactcctaacctcagatgatctgaccctctaggcctcccaaagggctggaattacaggcatgagccactgcaccagcctcaaggaagtcttaaacctataacgtaattgtttttactctttctgctaagacagttggaagaaaatgcaatttgcatatacagaaaagtagctaaagagctctggatgaagaaccaggaaatctgggtagaattgaagctctgccacaaactgcctgtgtgacattggataagtcacttatattagtgacctcatattttcaggggattccttcagatgtttgttctgggtctgtctagcaccaactatttaaacttgtgtaaagaagaactcatagatgttgacatttattctgaagaaaaaatggaggtgacagaactatccttctcaggtttcctcttgctgcagtataaaagagatattcatacagagacaatacaaagcagaatatggttaaaaaatgctagtttgttttacaaataagcagccaaattttgcccaacaactcataattaatttaccattaaaaatatttcatactatatatccaggctgggagcagtggctcatgcctgtaatcccaacactttgggaggctgagatgtgtggatcacttgagtctaggagttcaagaacagcctgggtgacatggtgaaatgccctctatacaaaaaatacaaaagtatccagatgtgagcctggcacggtggctcacgcctgtaatcccagcactttgggaggctgaggcgggcagatcacaaggtcaggagatcgagaccatcctggctaacacagtgaaaccccatctctactaaaaatacacacacacacacacacacacacacacacagagtatccagatgtggtggcacgtgcttgtagtcccatctacctggcaggctgaggagggaggatcacttgagcccagaggtcgaggctgtggtgagctgcaatggcaccactgcactccagcctgggtgatggacccagaccctgtccgaaaaacaaacaaacaaaaaacaaaacaaacacattttatataatactgaaacctaacttttccttctcaataagttagcctatgcaaatacagttcagctgtagcagatgaatcttcattgctcatttaggtaagtgcatcctcagccatcttgctgataaactgagactgtttccatcatcgttcatagaagatgcaaatacatccctttggggatgatgtgtttaactaatatttcaccatcaaactgaaagctgagttctcctcctaagccctagcgaggaaagagaaataaaagagaaagtttgatctgaaaacaacaaagctttaaaaatccccagaaggatctctaaactccatggggatttggcaaaaggtcatttggaatggattgtatgtagccaggataggaacccaatttggcttccagagattgactgaggtggtaaaggtcgagggtaggagagaggaggattacaaatcaatccagcccagggatgtgaaaacagttggtgctgctctaggaactcagaatgatgtggacttcaccttcctctctgccatttacacactacgccctatggtcctcctttggcaattgaaatattggtggaggcagaaggtttcccttttagcaactgggatgggaatctaagagattgtagagctaattaatacagactgccccagacgcagttaaaaatgcaggagaggctgggcgcggtggctcacgcttgtaatcccagcactttgggaggccaaggcaggcggatcaaaaggtcaggagtttgagaacagcctggccagcagagtgaaaccccatctctactaaaaatacaaaaattagctaggcatggtggcgggcgcctgtaatcccagctactcaggaggctgaggcaggagaatcacttgaacccaggaggcagagggtgtagtgagccgagatcgtgccactgtactccagcctgggtgacagagctagactccgcctcaaaaaaaaatgcaggaaagcagaaggaattgcttggatgtagaaattcttatttgggaattgtctgcggggaatgaggaagaaataagtgacaggttgtttttttgaccctcttcccttaggcaagttcaactattagattcaggcagccaggcacagggaaataaataaaatttcctatttaagcctacctaataataatgatttaatttcccttttcttccccacaatcatgacaaaagttgtagattttgcggactttcagattccatttctatctccttccaagccatccttctgaagcaagatatcttcttaatcactcctatcattatcaactttcagtggctctccatggttattaaaggccaaacatctcaagcatgcaaacatctccacaaccccaacgctgcctgcctttcccttttcttccgctgacctccccacatgaccaaacttccctcaataatgtggcagttacttgtaagttcatgcccttgccctccttttggcttggtgaaccctcatggattcttcaaaactggctccaattgtcaccttcttttgaagtttttgtatcttcccatgccagaggcttttgataacctccttatattgtcttggcctggtgtatataccggcttccagttttgttttcatttctctttccctaactacattgtgaccatttgttattcctactgtggccctaccccctagtagtgtcagtcataggactgatgaacaataaatatttgtggaatcaatgaagctcttggtagttaacctttggccttgataaggtggacatgtttttatgtattggctgacgtaccgaaagaaatcaatgtcaaagggaaaaagtcttaaattgtgtttgtcctttgaaatccaactcttttttactttgtatgggctacttttattgtgactaaacatcagtacacagtcactgttttacataaacatggagctatagtagacataattgtttaagaagcggaatgtaaccataataaatgaggaggacacaatagtacggaataggccccaagtaggagctaaacaaaccagacaatggtaagataaagtgaaagataaggagataacactcacagggatatttgccatcatgtagaagaggtatttctccattgtgtaggaatacatatgtcacccaagtgtcagttgtgtgggtgaccccaagtaccctcactttctggtctgagcctgaattttaaaattgaaataagatattgctatcgaaaagtctcacctgtgtaattttgtagagtttacatgtctttatgccccgttatgcttcctaaatattgctcctcatttctgctgttaactttctttctctcttttactgaagctttgcagtaatggagggatgatggcatagcatcatgtagatagcaacttgaaactgaacattagatagctttgtgctgaaattcatcagccattcttcaccacagggaatatcttgctggtttggcggagggctgaccttccttcttgtagctcataccttctccttatctccattctcttcctattgtcttgcctgagttattcattgagattcaaagttcttctcacttaattgtgcagtgtttaacttctcttttaattttccatgtccttccagactatgccccggaaaggtcacgtaggtgaggtccaacacaatgggtgttactttttcagtgagcagcatctccatggatctgatgctactctgcaaatgtgcagatgagaccacagtttgctcttgtttcatgtagcagttttcttctttgggatacccatagaaacagctgctttctagacttagaattttctgaagccaaaaccatgaaaatccagaatgtctgacctgaaagcaacattagaactcaaacaaatagaatatgtatatgttttttatgttctttttcttttgtgtgtacattttcagcaatttaccctcatgatatgaaatccagaagtgtaaaggcaacatggaaagctattcttgtagcataaaaattggccatgattcaaaaatgaatcagatgctatcggcaggctttcttcagacccattcttccttattcaatcatgctttatgtcaccccagtttagtgatttacttttagtggaatttaacttgaatgtcttaaaataccatcattacatatatttagctttggttacagttataaatttgtttaacaagctacatgaaatatatagttggcaatggtcaaagtaaatataccagtgagatgctcataactagttagcctgtttaaaaaaaatcctcaggaataataaaaaaataaaaaaccaatatagctgtcattaattgagtactcctatgtgctactcttccaagcacttactatgtaataactaccccacaaccaccatatgaggtaggtacaagtagcatttcccttatacagttgaggaaatgggggcataaaatgtttaacaacatgttcagaaaaagaaggacttagcacatggtctattgagctacttttggcctttggatctcatgctgaattttctgtatttcaaatgagatgaagaagctaaaattcacagaagtgaagatagttgcaaagatgggttcacatcagcagacacccattttggtgctctttgcattgtagcacctgatcctccttttttctctaaggggtttggggtttcagtttttgccgaagagcatgtgtgttttgcagctatctgggagtaattaacaaatgacagccataatactccagtagctatttgatttgtctgttgctaggaatgctttgccattgtttccagagaataattattatgtattaacctgtgcctgattcaggaatgcagttgtacattacaataaaaagttccactgctgtgaccctccatttaacctcataaattcagtgtatcattctcattatacagtaaagcttaagctttatagaactagagactggtgcagaaaataagataaaatatcctcaatatgaatcatgttttagttatctgaagtctctggtgccaagccacttctctgtatagttaagctacaagttaatgcaaaaaaaaaaaaaaaaaagcaagctataattttcaattcagttacaaaaaaaagcctatttagcaggattctttttgttgataataacagaaatcaattttaattagtctaagcaggaagggagaatttaagataatgaaagaagacatgaatgtattctggaagccagcagcagagatggagccgtgactcaaaagggactagagatggagagccatgaggagcccagaaaacaggctttctttattttgtcctccatttttctcttcaaatgtctttgcaaatatatctgtattactcatctactcctaagacaatggctgagcctcagttctcaagttaatatagtgtctgtataagtgaactgtcattgagattttactttcagtcacaactgtaaattcctaagaaggggctctgattggctcaatttggttctggtgctcagccattgtgcacttagctgagttctaggcaatggtgttatgtgactaaaacatggcttctacccagggggtagaatggagggctgttcttagaggagaaggaattatgagctgggcagacaccacagagttctctgttgttaccatgcatagtagtccattttcatattcctatgaagaaatacccgagactgtgtaatttataaagaaaaatggagtcacagttccacatggctggggaggtttcacaatcatggcagaaggctaaggaggagcaatggcctcccaagtagctgggtctacaggcgtctcacggggcaagagagctcgtgcgggggaactcctctttataaaaccgtcagatatcgtgagacttattcactatcatgagaacagcacaggaaaacccacccccatgattcaattacctcccaccaggtccctcccacaacatgtggggattatgggagctataattcaagatgagatttgggtggggacacggataaaccatatgaccatgtaactaggtctcagtgtaaaacagcccttagaaattcaaggactatgtcaaattcaagaatattatctcttttatctaactaggcatatttgtagactagatggcttgagtatgtaattaagtcaacatattttaaaatcagcctgaataaaccaaaatgttaattggaatctacggcaaaccaaaaaatagaatgaatcccaaagctaagtggaagtgttgtggattattcttgataccacaccattaatttgtggggataattgggatgcatccaagcttttagtcttgctgatgatgtttaagagttaaattagatgaccacatttcctgctgtaattgttggtcagatccttggaaatggtagggttttcacatgcttccatataattatagaaatcaatctaggggatgcacaaaaagagaaaaaggaatttcttgttatgttcttagtgtaaattttgtattctcctatgacctgaaagatacttgatgggtcatctggtctgatcccctcattttacagatggaaaatgaagcggagagaggagaagtgactagccttgttgtcaaatgacacatgagtaacagatccaggactaaaatcctagattccagtcttttattatgtcctactataaaaactaggattcacaaaacatatgatagtactgctaggtagttatattttcactagttttgttggtgttgttgttgtttgagacagagtctcactctgtcacccaggctggagtgcagtggcaccatctcagctcactgcaacctctgccttctgggttcaagtgattctctgcctcagcctcccaagtagctgggactacaggtgtgcaccaccacgcctggctaatttttgtattttttgtagaaaggcagttttgccatgttggccaggctggtttcgaattcctggcctcaagtgatccaccctgtcttggcctcccaaagtgctgggatgagccactgtgcccatgagccactgcgcccagcctattttcactagtttttaaattgcttttttctccaacatctggactttacttattcagtataatattttttcaggccctgagtataaattctttggataattttctggctaatttaacttacctgtagcaatactcagcagcacagacgattagataataaagaaaaaaattttctaactattattttggcaaaggactaggtttaaattttcttaattacagaagaaaaaacagcaaacaaatagcattttagtttggagtaaatttgttcttcactacaaattgttcagatatctataaggacaaatttccatattataattttgtgtgttgcaactataaaaatactttatcttaaatgccttttatccttgttttccccactccatcaagaaagactcaaagaagaactgggctttagattagaagttaaaaactggctcatagatttatatgtgcacagtgctctttcaatctttctgttttcattgttcataacgaacagaggaaatatgactaaagagattttactgatccaaagatgctaaattccaatatgcattctgaatttcaaataatttgggaaatgaagcatgatgataaacaggaaaatgaaaaaaaaaatgtaagtgtaatgtgccaaccttccttggccaaatggtctggggttagagttctgaattcctggattgtaatttatctgatttttaaatgtatataacattaatttgctttttcaattctacagaataaattgattctcaaattaatatttttaatttcaagaacaagtttctaaacaataaaaaagagcttttattataattttaagtaagatccttggtgattataattaaaaaattaattaaaattattatcaaagaacaacagaatcatattgtaaaaaaaaaaaaaaaagaactacaggggtcctgctccctaacattgagtcatgttccccagaaacataaactttcaactcttagctgactcttctgaattttaaccccatatttctaaatgtgctaaaaatgtattaattttttttcagtcgtagacattattttattgattgactttctgtacacagtttttcaactccctgagctacagctgtcgcagtatttgcatagtcataatattatgaatgatgaatttttacttatccaaaaattataatatcaagaagatggggttagcagaagtatgtgtatgtgtgtatataagggattttctttttttttttttgagacggagtctcgctctttcgcccaggctggagtgcagccgcgcgatctcagctcactgcaagctccgcctcccgggttcacgccattctcccgcctcagcctcccgagtagctggagctacaggcgcccgccatcacgcctggctaattttgtttttgtatttttagtagagacggcgtttcaccatgttggccaggatggtctcgatctcctgacctcgtgatccgcccgcctcggcctcccaaagtgctgggattacaggtgtgagccactgcgcccggccaagtaagggactttggtatacatggatctaaatttttgttttgttttgttttttgagacagggtcttactctcattcaggctggagtgccgtggtgcaatcatagctcgctgcagcctcgaactcctgggctcacgtgatctttctgcctcagcctcctaagcagctgggactacatgcgtgcaccaccatgctcagctaaatgctttttttccatcatcaatggatgaaataatatctaaaataagaaaacaatgatcaagcatttaaaagaaagaaaaggaatggaatcactgggcagattctgctccttgatgaatatatttgtttctaattaaaatgtatattttaaatcaaagaaatacacaattacatgtttctcttttgaacaactttttgtttttcccagcattaatcattgcctaaatttttgattagccctttttcccatatttctgtcactaattcattctatagtccactagttgaatatgttttttcagcacaatcaacatttcagatagtctatcagttctttttttttttttttttatggagtcaccctgttggaactttctattctcttgtgccaatcttgacaggtctctaggcttgatgaccagcgaacatcctgcgacttccctaacttcatactggaatttcttccccttcctgtgtgagatcctctatttcctggatcctctgtcttgggctactttctcattttgtagattttattttccaggcacttgttaagagggggtgcttgaccattaaatttcttgagacagtatctcacatatctgaaaacatttttattctaccctcttatgtgattaatagcatgtgtgtacatgcatatgtgcttgtgtagagaattctatgtggaaaccgattatttctccgaatcttgaagacattacttctttgtctttaagcttcaagagttcctgtaaagaaggctgatattattcacaatattttatatatactatttttttccccggaatttgaattttcacaatgatgtgtgttaatgtgggtttgtaaaaaattcattgtgctggatactcagtgcaatattttaatctgcagatttctgtctcttttctatttcaataggtttttggggaacaagtggtgtttggttgcatgaatagtggtaatttctgagatttcggtgcacccatcacccaaccagtatacattgtactcaatgtatagtcttttatccctcaccccctcttccactctttctccccaaatccccaaagtccattgtattattcctatgtctttgcatcttcatagcttagctcccacttctgagtgagaacatacaatattcggttttccattcctgaggtagttcacttagaatcaatggtctccaattccatccaggttactgcaaatgccattattttgtttctttttgtggttgagtagtattccatggtgtgtgtatatatcacattttctttatccactcattgattgatgggcatttgggctggttccatataatctataaatctctatctttcagtaccagagcattttttcttgagttatttcttaaacttctctcctccaagaaaacctgaatctctatgggtgggctagggcttgctgacttcattttagagagactaggaatggacctggctgatttgttgggggaattctcaaaactcctgagcctctcagtttccccatagaggaactcttcaatttcctgactaggtgttataagcctggctaccaatgttgagaaaccaagtggaagaagagagctgattggttattctccaaacgacaaacttcctgtgtgtgtttttgtttgtttgtttgtttgtttttgctagactgaagaagggataggtaaccagtttgatgaatggtggaggaagttggggagtataactccttcttatataatcctgaaatcccatccttcatcttgaagttttgagacagctagtgacacaatattctgagcctctctgaggttctttgaaatgagttgcttggatcttcttggctttctcttctgtaacctagatttctatcaaatctattaagccaattactacttaatcattcttttcaagttccaatattttgctgacatcttttatatactattatcatctctatcattctttttattcctgtgtatttatataattttaatttatatctatttagttcttttattttcttcccttttggaagattgatggaaagagagataaatagatatgttcttccaccatatttattctttaggggaatcaggacttgaccctactgtgctgactacttgactcagttcttatatttttgatttcaatgatttgttttggcaggctaatctctaatgttttctccacattgtaatatcaaatagctattgagagaaatattgtacctggctgcttaacttgcttttctgattataattctctctaatttctcttatttcttgcaagtcatagtaaaaaaaagatgcaaaattagtagaaatagataatacattgaaagtataatcctagcactttgggaggctgaggcgggcggatcatgaggtcaggagttcgagaccagcctggccaacatggtgaaaccccgtctctactaaaaatacaaaaaactagccaggcgtggtggcaggcacctgttatcccagctacttgggaggctgaggcaggagaatcacttgaacccaggaggcggaggttgcagtgagccgagactgtgccactgcactccagccttggcaacagagtgagactccgtctcaaaaacaacaacaacaacaaaaaacaaacaacaaaaacacaactaaaatgaaatgaagtaaacctgcacgtatgagaaagcatataatctcaccaaatataaaatattgcactgaggttcaaaatgctgattatagaagataggatgaagactcctatcatagttagctgttcacatgaaaacaagttgagagtttaaagggtatatgtgacacacattttgccaatgttattaagaaaacaaatgtatttataggttgcaatgtataagtatataatttaagttttaaaagatcagaccacacctagaattttgtgcttattctcaatatagtactctatttttaaaagggagattttcagcagaagtatatccaaataaaagtgtttaggatggtgacaatttctggaagcaggtcccatggggaatgattaatttttaccatagacagcctggagaagggataatatgatctaaaatatttgaagggctatcaagtgggagagggagcagattaatttagtctcattctaaaggtcaaaaataagatgaatttagtgattcatatctaacgggagctctcctgttagatatgaattcttaggaagacagactcttgaaaagattcctctttgaggcgaggttttgaaccagacacttgaatcatctgtcaacatccttttaatgaataacttgttggaaaagtgcctttgaaaacatttatggcttcctgtgacttggcttaatttggaaaacacgtggttactttgtcttcaacagattccttgcagtcaccttgaattcatgaatgatgtgattgacttttggtctacagctttcgatagtgagtccctcagtgaagaccttccctatcacattttttattctcagcccttttctcctgtctacttttcttttatgttattctatttaatttaatttttatttttaatttatttttaaattttaaatataattttatatatttaaaaatattgtttgtagttatttgtaattattatggatacataataattgtacatatttacggggctacatgtgatattttgatacaagcatacagtgtgtaataatcaagtcagggtaactggaatatccatcacctcaagcatttattatttctttgtgttaggaacattttgattctactattttagttattttgaaatatacaatacattattgttgactataatcaccctattctgctaccaaacactagattatttgttttaaaatctttattaagctataaccgacatatgataaaccaagaatataaagtgtacaatttgacaaatttagacatatgtatacacataaaattcttttgtttttctaatttgatgatctcttacctttgagatgtttagactaattacatttagtaattgatgattaatgattgttatgcttcagtttaaatatgccatcttgctgtttgttttgtatttgtatcatctatttttttattcctattttgtgccttcttttgggttattacaagtgtattttcattcctccttgccttatctttgtgctatttttgccacatatattacttctacctaagttatatatgtcatactgcattcttcttattttgacttaaaccaatcttctggtgattaatcatatatatatatatatatatatatatttttttttttttttttttttttttttttttaaacagagttttgatcttgttgcccaggctcgagtgcgatgatgggatctcggctcactgcaacctctgcctcttggtttcaagcgattctcctgcctcagcctcctgagtagctgggattacaggtgtgcaacaccatgcccagctaatttttgtattttttggtagagagaaggtttcctcatgttggccaggctagtgtcaaactcccgacctaaggtgatccacctgcctcagcctcccaaagtgctgggattacaggtgtgagccactgtgtcaggcctcttttataagtctgagaaagtctttattatacatttttgtgaatggtactttttcaggtttagaattttaaggtgtgagggttttcttctttcggtattctaaagatgttgttccactgtattctagcttgcattgttactgaacaggagtcagctattattatttacattactttatatataacatgactttttctctctggctgcttttaagatttttttttatcaccgccaggcgcggtggctcatgcttgtaatcccagcaatttgggaggccgaggcaggcagatcatgaggtcaggagttcaagaccagcctggccaaaacagtgaaacccccgtctctagtaaaatacaaaaattagctgggcaccgcggcaggcacctgtaatcccagctactcaggaggctgaggcaggagaatcgcttgaacgagggaggcggaggttgcagtgagccgagatcccgccactgccctccagcctgggtgacagagctagactgtctcaaaaaaaaaaaaaaaaaaagattttctatcactggttttaagcctgatgtttatgatattttatggtttactttttttgtgctttggattcattgagctccttaaatctgtgggtttatagtgttcattacatttggaaaaaaattacacttttttgcttcaaaaatttttttcctatttattcctctctctcttctccttcagcaattctaattacatcttattaggcctcttgaagttgtcccacagcttgctaatgttctatttattttttgtctgccgtgcatgcacgcgcgcgcgtgtgtttgtgtgtgtgtgtacttcattttggatagttgctattgttgtatcttcagtttactggtattttctttcacaatgtgtaatctgttattaattccatatagtacatttttaatctcagaaattgttgttttcatctctagaagattaatttgggtcttttggaaaatattttttatatatctacaaaacatgattagttttacacctatcatcttgaacacattaaatatcattaacaattattattctaatgtctttttatactaattttattatctttttcttttctgggtctgtttctattgattaattttttttcttttttaaaattatacttaaagctctggggtacatgtgcagaacgtgcagttttgttacataggtatacacgtggcatggtgatttgctgcacccatcaacccatcacctacgttaggtatttctcctaatgttatccttcccctagcccccccaccccctgacaggccccggtgtgtgatgtttccctccctatgtccatgtgttctcattgttcaacttccacttatgagtgagaacatgcagtgtttggttttctgttcttgtgacagtttgctgagaatgatggtttaatttttgtccttagcataggccattttttcttgcttctttgcatgcctggtaatttttgattgtataccagacattgtgtaattgttgggtgctggttatctttatattctatatcttgtatcttatatttttatattctagtaaatatttttacctggttttggaacacagttacattattagcaagtagtttgatctttctgaggcttgcttttaagcattttaaggtaggactagactggcctttgatcctgaactaaattttccctttactgaggcaatgcctttctgaatgctccacctaatggactatgaattacaaggtgttctactctgcctggtgagaacatggactattcttggatttgtgagccctagcagtggttacttgtgctcttttttggatgttccttccatagtctcatacagttttctcacatgcatgcacctgtcaatatgcagctgaacatttgagggggaccttttgaatatttctggagctcaatctttttctctgcgtgcataatttctctccagggacctgtcttgcaaattctagccacctttgccttctcagacgccgagctctctctcctcaattcagggtgacagctgggctctgcgtgggtgctacacccctgcagtgttgcctggacagaagtatctgttcgggcagtaaactagggcaacagtgattaccttgtttgtttctctgagtttcaagtatctctgccctatagtgcctgatgtctactgcttgaaaaccactgttacatgtttgttttttttggttgtttagtgaaagagtaaatccaatcacctgttactccatcttggttatatgtaaaactcctgttgttctatttttgtgataaaatttaagttccaggccatgcgtggtggcccgggctcatacctgtaatcccagcactttgggaggctgagacgggtagatgactttgaggccaggagtttgagaccagactggccaacatggcaaaaccccatctctactaaaaatacaaaaattagccaggcatggtgatgtgtgcttgtaagcccagctactcgggaggctgaggcaggagaattgttttaacctgggaggcagaggtttcagtgagctgagattgtgccactacactccagcctgggcaacagagcgagacgctgtctcaaaaacaaaacaaaacaaaacgaaacaaaacacaatttaagttccttggctctgaaccactgacttctacttcggaatgcttacataggctgctttaggtggcagcattaggcatcatgtcatcattcctaactttacaaaagctattatgaggatccttatttctagcatgtgtaaagtagtcccattcctacctcaacagatgtttgatgagtgctagatccctgatacttgggatgaaacggtgaagaagatagataaaaccctttcctttaaaaagaaaaatttaaataaataatacgggccgggtgcagtggctcatgcctgtaatcccagtactttgggaggctgaggtgggcgcatcacgaggtcaggagttcgagaccagcctgaccaacatggtgaaaccccatctctactaaaaatacaaaaaattagccaggcatggtggcatgtacttagagtcccagctactcaggaggctgaggcaggagaattgctagaacacgggaggtggaggttgtagttagccgagatcgcaccactgcactccagcttgggcgacagagtgaggctccgtctcaaaaaaaaaaaaaattataaataaataatacgatagctccctatcagtacttttttacattatttattattctttgccacctgatataccatatgtccatcagtttattttttggttttactccagggaaatcgtaagctccgtgagaataaggactttattttctttcatttcaagtggttgtttaacatacagatttttgaccccttcctcagatttatggatactgaatttctgagggtgggacctgaaaattaaaaatttgagcaatattcccagataatttgtgctgactctgtggttggtgaaccactggtttagggtatagtaaaggttgaaaggaaatttagtcataagctgagtaatgaccttttggccaacgatcaacagcgtatatagtggtcctgtaagattatgatatcgtatttttactgtacctttcctatgtttagatacacaaatactattgtgttacatttgcctacagtatttggtacaggtttgtagcgtaggagcaatagactatacgatatggtctaggtgtgtaggaggctatgccatctaggtttgtgtaagttcaatctatgctgtttgcacaacagtgaaatcccctaatgatgcatttctcagaatgtatccctgtcgttaagcgacacatgactgtagttatttaaatgaaactgaatgatgtgagtgtgtgtgtgtgtgagtgcacacaggtgtgcatgtgggtttgggtgtggatttaatgctgaagggttagtatttccaggagagggagcggcgtaagctctagttagtaaggaactattttaggaagtatttttagctggagagggatatgattaggtctacatttttaaaaagatcgctctggctgtagtgaggtagttttatttgtctaaaaacttctgccttgtagctgagaggtaccatatgcagagaagagatcatgtgctggggatcaaacagagcagacacagattctcactagctgtgtgactgacaaaaagcacataacttctctgagtcttactttccacatgtgtaaagtggggagagcaatacatttcttattggattttctaagggattgactggcttactttagtaaaacaccttgtacataacagacctgggaataatgctagtttctgatggtactcattctcaaggtgctgttgcccttcagaagaaaaccagaaaaacacagccaacactggcatctcagatcagtgttggcaagttgtgaaaccagccacaggttggagaagtcctgcacaatgggtgggtgtgtgtgggtggtgagactgtgagtaggatggatcttctagaggcagtgtcagaaaaaggagaagaaagtgctatgaccagttcttgctgaaaaaaagacatgaggccagatgtggcggctcacgcctgtaattccagcactttgggagactaaggcaggaggattgcttgagcccaggtatttgagaccagcctaagaagcatagtaagatcctgtctctacaaataatttaaaaaattaaccaggagaggtggcatgcacctatagtcccagctatttgggagcctgaggtgggatggttgcctgagcctgggaggtcaaggcttcactgagccatgatcgcaccactgcactccagcttgggcagcagagacagggcaccaccctgtctccaaaaaaaaaaaaaaaaaaaaaaagaagacatgaataatttatacacagacagtgtttatcatcagggactgctgagactggcagccaactattcaataagacctttctcaaagaccagtacagatcactttagttccagcaatgaagttttccaagtatttcatcagatttccctcttccctggttatacattgctcttgaatgagaataaaaccattaagaacattctgtgctttctcttctcttttcttcttttcccattcctgtccttccttctttctttttcttcctaacttctatcttaaacaattagcctctaagagttggacctgttttacattttcctcttactggaagtgaatgatgatttgagcagagatctatgttaccaagtcagcatcatgttcttccctcccacacaacccactgctgtgtgtaatcatctctcattaagtttcatgtcatctgagtgcaactcctttcccctttcaggttgcccttaatgttcattgtaccctgctttcaactggatagaatttatggggtgaaatccagggtaaaccatgctttgctgaaacattatttcattcaataaatacaaatgaacaactgaccacacacagtcatacacacacaatcttgagtacctactgtgtgcctggcaatgttaataccaaatacatattggtgaataaaacaaccagaatccatgtatttgtgggagaggcagacaaaacacacacatacgtatatgtatataataagaaatggtgataagtttcataaaggaaataaacagggcacattaacagagaataacaaggggagagggaagaagcttatttggcttggccctggaggcatctgtgaagataggaaattgcagaaggaggtgggtcaaccatgcagaaaggagggatcaatgcacttaagacagaaggaacagtatgagtgaaggtcctgaggcaggaaagagctttgtgtgatgaactgaaaggagaccagtgtggcttgggcatcaggtgtaaaaggcaagagtggcccaagatgaagctatacaaggattagattatgctgatctttgtagactctgggtaagaattatgagttctattttaagcgcattaggtagactttgaaaagtcttgtgaaaagcatgtgattatctgattgttattttagaaagatttcctccagcttctctgtggaaaatgaatcggaggagcaaagcaaaatacaggaagcccagtgcagaggctatcacaatggtccaggagagagatggtagtggcgtgaaccaagatggtagaaatagctataagaaaatgagcatatatcatgcttatttcggaagcaaaaatgaaggcatatatttggggttgaaagacggtgatgaaggatgacttacaatttctagccatttattgagtggaggaaaggccaaagaggggtggtttggtggtgaaatcaatagcttcattttgaaaacgttaagtttgagattctgggagatatgcaagaatacatatcaagtaggtagttaatttataaatctgaagtttagagaggaactcaaggtagtgattacaaattatagctccatcaggtattatatagatggtatgtcagtgggagatcaattaagatttttaaaatgaggcacccaaatatagtggatcaaacaaggcacaagtttctttatcattcatgtcatagttcagagataggtgggtgatctagttagacagctccactccacaaggtcattcagggattcacggcacttttatttgtcatcccttgaatattatttttctctgtatggtggaaattggttcattagcaccaagaccacatcctatcattcagaaatagggaaaaaggtgcaccttctttttaaggaaacgacccaggggtaacacatgttatttagctgcaagagaggctgtaacatagagtctataaactggatggccatatgctacctgatgaaatgtcaattccattactaaaaagaaggggagaatggataccagaagacaagacatactgtctgccacagacagtaaaaaggcaaagcctgcatgggcagggtttctcaatgtaccagcagcactttggaacagataattcttagttgtgggaggctgtgctgtgcattttaggattgtatactcaccatcaatgtttagtagtatttccagcctctgtcctttagatgccagtgacatactcccagttgtcacagtaaaacatgtctctagtcattggcaaatgtcctctagggggcaaaatcacaccctgttgagaacgactgggttatatcaggagaacgagtatagaaaaagaaggagtgctgccactggggtttgagaagtgccaacatttaaagattgggtagaagaggagtaaaggagacaggcaaggagtaggcaatggtatataatgaaaaccaagactgaagagtgtcacaaaagccaatataggagggagttccaaaatggtaggagtgattgactatgtggaatgctactatggaatcaactgaaacgagggcagaaatgtgctcataggatttggtaacatggagattacaggtgacacagacaagagtaattgctgtgtagtagtggaggtgaaactcagcttgtagtgagtaagagtaagtggaaaatgaataagtggacataatgtttgtagacaaccctaaacaatgaaaaagtacagagaaatggagaagcatctggagggttatgagagttcaaaaggggtgtggttttgtttttaatgagagatactaggaggtgtttgtatgagccgaaggaaataatccagtacacaagagtgccaccatccaaacatgtaaagtgcttggaactgcatttaacaagtaaactgtatattaaatattaatattactctatgaattagagattaagtgggcaattgtgcttttagaccctgctacagatagaacatttttgtccccctccaaattcctatgttgaaatcttaacccccaaggttaagatttttttcttttcagaattccttcaattttgattgtggggataaaatcagacagccactgaagatagaatacagttactgggagtaatcacaatgctgttctcttttataaagtggatatgatgtgttatttattcaattaatgcacgtcgccaaaaattgtccttattccttgattgtctcttttttttaccagtctcttgttgaagtggcctcattgtctgggaaaatacttgaggtttgttgtctcacagccatggagatcaaggatgcggacacacaatgagtgaggttaagagcggaaatttaattgggaaaagaaaaagaatagctctctgctacacagagtagtcctgaaaaaataggttgctggtccacagcaaaatgcaggggtttttatagatgagctagtggggaggtggtgtctgatttacatagggtgcaaaaatctggttaggaccaggtgtgccatttgcctatggcacaaatctctggccgcccccatgccaatcttctattatgcaagtgggttccctgcctgagctgtgccatgttgcccatttttttcttactgtacatgtgctaacaaaaaagggaagatggagcttccatggtgcacacgcctagcccccaggtagccctttcttattggtacagctgctggcattcccctgtgcaagcttccagcttgcttatctatatttgcagcttgatttttcaggctgctctttgttgggaaagaaatgattttttgggctgctttttgtttgaagggaagctctgctaaggactcgtttgccctcactatctgcctaaataatttctttctaactaaatctgcctaaataatttctttctacctcctgtatcattgctctgcaaagagaggatacctggccaccacattggcccatatgatgctgccactggtcagatctcggactatgctaggcagctcagagacctctgctgttatctgtcacattgcatctcagtctctcagagttgcattgtggggggtcttgttcattgtgttaaagtcaatggtgacactgaaagacacaccaatctcatcagtcctggcatagtgtctcccaattgacccagaggaatcatctactttgtgagacaacctgtgcctggtcagggcttccgataattccttgataaatggcatgaatggttttggctcagtgagagggcgtaacatttgaatagagtgactatagcagggaaactgaggaatgttctctgttcatctccttctcttacatggaatatatgttcaaataccatatacataatcctgcacaggctgaaggagggttcagttacattcagaacaacttcttccacacagagtgttctctggaatctcatcacgtttggccacatcttttgttagccgaaatgttttcccttcgggttcaattgtaaattcccctttctcattcaattgcatctcaatttctgtaatgtaacattcatcacaattggcgagatactccatcatcagttttgcatgcttcttatacgccttaccaactgctcccttattgggtattaggtagacagcttcatattccttccctgtgaattgagactctgcactcaaacaaacgtcatggttatttacatattttggatactaacctattatttgtcatacacattgcaaacatcttttctggtctctcactcatgtgttaactttatgttttgtgctcacttttgcagcacatacactaaaattggaacgatacagagaagattagcatggcccctgtctgtgcaaggatgatatgcaaatttgtgaagtgttaactttatgttttattttgtcattctaacattttctttttgtcatgtagtcaaatatatcaaaccttttgtttaatatttttaggcatattctattcaaaaagtttttctttatgggttttggttttttatgtcttcctctcccaatgtcacaaagatatttcccctaatttagaatcttttctaaatgtttaaaaagtttgcttttcagattaatgttttaaattcatatggaattcacttttttttgtatatggcttgacacaaggatgtatccacttttattaacttccaaatggatagccaagtgtcccacaccattgactgactagtctttccttttcccactgatttgtaacactgctaaatctccatatgtgtgtagtttggatattggttcatttgtctattgccatgccaatatgacagtgttctagttattgtgatttaaaagaagtcttgatgcttagtcaggcaaatcctactccttgtttatcttcttcccaatattcatgtttcttcttgttcccttattcttctatgtgaattttagaactagcctgttaatgccgtgaagaaaacctttggactaacatttatgtgatataaaatgttttaatccgttcattttaaatctttctgtgtccttactttcaggcctgtcctttgtaaacaaaatctattgggatagaaagcagaacaatctaatagtttgtcttttcagaggaaagttacgtttatttacatttattggggtatatttatgctgctttaaaaaatcattttactttgtgttttctattttttgccttctcccctcccctttttttcttcctccatttctgccatctatatgattaattgcattttacttatttcctattttgcttctctgtagaagttctacattctatttctattcttttagtagttgcctttacactttaacatatatacagtccaaagtctaaaataaatcaatatctttaatctctttttaaacgataaaagattcttagcttcattccatctctatttccaagttttggttccttagtttgaactgtttttaatcacctccaccaacactggtcaatattattttttaaatatcaatacattaactttactcacaagtttgccaatttcttttcttttccttgcttctttaatccacctctttacatctgggttttgggttcttttagctgaactatattctttagaagcagtttaagtgaggacttagaaactcagttttttttttttttttgcctgaagatatatttactttgccctcattttttttcatgagaatttagttgagtgtgggaatatagatggacaaatatttttccttagctctttgcagaaatcgttccattgttttctggcatctattataatgaatggagagacttttcgatgtaatggtcattcttttgtgagtaatctcttttctctaggtgatatggatattttctctttgcatttcctattttgttacttccctacagtatatgtaggagaattttgttgttcttttcattgctaggaatgatcttttgatgtgagaatttaagtcattcttaagttctgaaaaagttattattcgatttctatttcaatattgcttttcccctcactttctgtgttctcctacaatttttttttagacccatgtgggcccgtctctctctccacttcagttctcttaactctttttttctgttttcttttcttttttttctttctttctttcttttttttagacaaggtcttgctccatcatccaggttggagtgtagtggcatgatcacaactcactgcaacctcagtatcccaggctcaacagatcctccccactcagcctcctgagtagctgggactataggtacttgtcatcatgcccagctaagttttaaaattgtgttgtagagatgggatcttgttacgttgctcaggttggtctcaacctcctaaactcaagcaatcctcctgccttggcctcccaaagtgataggattataggcatgagccaccaggccaggccttaacttttgtattttccattctgttgccacatatgatgcattccaacatcttcatcagctccgttttctaattcattaattatttcctcagctatgaataatctgcttttggcccaaccattaaatatgaaggtttgtatgtacttatttcagtgactatgtgttcattatcaagatttctatttggttaaaaaatgtttttaattcttaaaaaaattaaaacgattatttaaaatattttaataatgcattgtgtttatgctccttctctctttaaatataaaaacatttatttaacatttttatactgttttatttgccattttctattgcgaattcctactatttattgcatcttctgactttcttttatgtggcttaactcatgtggttcaaaattattttccgtagtaaactcattcttagtgaaagttgagtctgcatgacttgagatatatcttcttctttataggatgatctgagtttgtttcttctaaagctcagtggatttttaccaattctggatctgtttttgtgataatttcttggcttcaagtgtcccatcaattggattgtgtcaatttaaggccaacgatttcttatgagtctaaacttttagccatgacacctgatgggtagctttgttaccatgtatccaggccaatagaagagtatttcaagtccaattttatggtgtgatggcatttttcatcactagcttttagtagggattcaagttcagcaccttgtcttgcaggaacctgaagtacaggaatgcctcttgtccctacggtttttgccagtttctgatccttctgggagttctttggctttgtctgctgttcctcaccctgcctttgatttcctgctctattcctggacctgagaattttcttttattattgttattattattatttttgagacaaggtctcactctgttgcccaggctggagtgcagtggtgtgatcatggctcactgcaaccttgacctccccaggctgaggtgatcctcccacctctgcctctcaagtagttgggactacacgcacataccaccatacttggctaattttattttattttttgtattttttgtagagatgggatctgaccatgttgagcaggctggtctcaaactaatagtttcaagccatctgtctgcctcagcctcccaaagtgctaggattacagatgtgagccaccgcacctggctccttttattattattgaatagtttggttacgtatttaattttttctttttgttatattttctccagtgtttctatgtttatcatatggaaggacagcctttccacattagctaagcttgccagattatcagaagtcgcttttttttttctggctttagaagagatttttattccctgactagttaagaattctcgagttcccagtgacacaaaagatggcagaaaaatagcttaaaaccttttattctcttttccatccatctatcgcacccaaccacacacatgtttcctgacacccacggtgggtctgacaccgcccagataaatgagacgtggtccccaagaaggcgcctccaggctctccaggacaaggatcacaaaactgcaacacagagtgatcccgccctggagagggagctccaggaggaagaagtgttagtccatctctctggctgcagatgtccccaggggtgtcagcatgggcaccggcaatcgggggcaccctcctcaaatctggccagggataccctatgatgtgacactttccctagacacccatcttcccaccatcttcagagggcgtgacccctctctccccactcggtcccttcaggaacagattccatctctcgttcttgctatctcagtcctcatccccacccccctgctctaagctctcaggggcccacagatcagatggcttccccggcgggcactgtctcccctctgtatgtcctgtgggcagccacaggtgggcatgcacggcaggtgcacagcatgagcacagcaggcacacacactgacccagtgccactcagcaccctgcgggtggctgctcctggctgaaagcttcctagcacactcgtgtgggtggctgctcctggctgagagcttcctggtgcactgggctgtggcctctggcttctatctcatctctccaagagccaccctggtccacacaggaggcggcagcaaggccaatccagggtcttgggatgggggtggagggaaagtcgagcaatttgtagacaggggtgagatctccccagagctcagcttcacgacatgctgcttctagtcgcagccaagtgcaatgtatggactctgtgtggatcctgacttgaacaaaccaatgctaaaaagaggttaggatcaatatggactagatatgcatgacattaaggagttacgattcatttgtgatgatggatgtgatattgacatggtggttatgtaaaagtaaaaatagttctcttcaactgaaatatctactgaggtatttacaggtacaatgacatgatatctgggatttgactttaaaacgctctagcaaattctcggtttgtctgttattggtgtataagaatgcttgtgatttttgtacattgattttgtatactgagactttgctgaagttgcttatcagcttaaggagattttgggctgagacgatggggttttctagatatacaatcatgtcatctgcaaaacagggacaatttgacttcctcttttcctaattgaatgccctttatttccttctcctgcctgattgccctggtcagaacttccaacactatgttgaataggagtggtaagagagggcatccctgtcttgtgccagttttcaaacggaatgcttccagtttttgtccattcagtatgatattggctgtgggtttgtcatagatagctcttattattttgagatacgtcccatcaatacctaattgattgagagtttttagcatgaaggttgttgtattttgtcaaaggccttttctgcatctattgagataatcatgtggtttttgtctttggttctgtttatatgctgggttacgtttattgattttcgtatgttgaaccagccttgcatcccagggatgaagcccacttgaccatggtggataagctttttgatgtgtttctggattcggtttgctagtattttactgaggatttttgcgtcaatgttcatcaacgatattggtctaaaattctctttttttgttctgtctctgccaggatttggtatcaggatgatgctggcctcatcaaatgagttagggaggattccctctttttctattgattggaatagtttcagaaggaatggtaccagctcctccttgtacctctggtagaatttggctatgaatccatcgggtcctggactttttttggttggtaagctattaattattgcctcaatttcagagcctgttattggtctattcagagattcaacttcttcctggtttagtcttgggagagtgtatgtgtcaaggactttatccatttcttctagattttctagtttatttgcgtagaggtgtttatagtattctctgatggtagtttgcatttctgtgggatcggtggtgatatcccctttgtcattttttattgtgtctatttgattcttctctcttttcttctttattagtctttgtagcggtctatcaattttgttgatcttttaaaaaaccagctcctggattcatcgattttttgaaggtttttttgtgcctctatttccttcagttctgctctgatcttagttatttcttgccttctactagcttttgaatgtgtttgctcttgcttctctagttcttttaattgtgatgttagggtgtcaattttagatctttcctgctttctcttgtgggcatttagtgctataaatttccctctacacactgctttgaatgtgtcccagagattctggtatgttgtgtctttgttctcgttggtttcaaagaacatctttatttctgccttcatttcgttatgtaccctgtagtcattcaggagcaggttgttcagtttccatgtagttgagcggttttgagtgagtttctttttttttcttttttttttttttgagatggagtctggctctgtcgcccaggctggagtgcagtggcacaatctcagctcactgcaagctctgcctcctgggttcacgccattctcctgcctcagcctcccgagttgctgggagtacaggtgcccgccactatgcccggctaattttttgtatttttagtagagacagggtttcaccatgttagccaggatggtctcaatctcctgacctcgtgatctgcccaccttggcctcccaaagtgctgggattacaggcgtgagccaccgcgcccagccttgagtgagtttctgaatcctgagttctagtttgattgcactgtggtctgagagacagtttgttataatttctgttcttttacatttgctgaggagggctttacttccaactatgtggtcaattttggaacaggtggtggtgtggtgctgaaaaaaatgtatattctgttgatttggggtggagagttctgtagatgtctattaggtcctcttggggcagagctgagttcaattcctggatatccttgttaactttctgtcttgttgatctgtctaatgttgacagttgggtgttaaagtctcccattattattgtgtgggagtctaagtctctttgtaggtcaccaaggacttgctttatgaatctgggtgctcctgtattgggtgcctatatatttaggatagttggttcttctcgttgaattgatccctttaccactatgtaatggccttctttgtctcttttgatctttgttggtttaaagtctgttttatccaagactaggattgcaacccccgcctttttttgttttccatttgcttggtagatcttcctccatccctttattttgagcctatgtgtgtctctgcacatgagatgggtttcctgaatacagcacactgatgggtcttgactctcaaacagagagccaaatcatgagtgaactcccattcacaattgcttcaaagagaataaaatacctaggaatccaacttacaagggatgtgaaggacctcttcaaggagaactacaaaccactgctcaaggaaataaaagaggatacaaacaaaaggaagaacattccatgctcatgggtaggaagaatcaatattgtgaaaatggccatactgcccaaggtaatttacagattcaatgccatccccatcaagctaccaatgacttgctttacagaattggaaaaaactactttaaagttcatatggaaccaaaaaagagcccgcatcaccaagtcaatcctaagccaaaagaacaaagctggaggcatcatgctacctgacttcaaactatactacaaggctacagtaaccaaaacagcatggtactggtaccaaaacagagatatagatcaatggaacagaacagagccctcagaaataatgccgcatatctacaactatcttatctttgacaaacctgagaaaaacaagcaatggggaaaggattccctatttaataaatggtgctaggaaaactggctagccatatgtagaaagctgaaactgtagcccttccttacatgttatacaaaaattagttcaagatggattaaagacttacatgttagacctaaaaccataaaaaccctagaagaaaacctaggcaataccattcaggacataggcatgggcaaggacttcatgtctaaaacaccaaaagcaatggcaacaaaagccaaaattgacaaatgggatctaattaagctaaagagcttctgcacagcaaaagaaaccaccaccagagtgaacaggcaacctacagaatgggagaaaatttttgcaacctactcatctgacaaagggctaatatccagaatctacaatgaactccaacaaatttacaagaaaaaaacaaacaaccccatcaaaaagtgggcaaaggatatgaacagacacttctcaaaagaagacatttatgcagccaaacaagacatgaaaaaatgctcaccatcactggccatcagagaaatgcaaatcaaaaccacaatgagataccatctcacaccagttagaatggtgatcattaaaaagtcaggaaacaacaggtgctggagaggatgtggagaaataggaacacttttacactgttggtgggactgtaaactagtttaacaattgtggaagttggtgtggcgattcctcagggatctagaactagaaataccatttgacccagccatcccattactgggtatatactcaaaggattataaatcatgctgctgtaaagacacatgcacacgtatgtttattgcagcactattcacaatagcaaagacttggaaccaacccaaatgtccaacaatgatagactagattaagaaaatgtggcacatatacaccatggaatacgatgcagccataaaaatgatgagttcatgtcctttgtaggaacatggatgaagctggaaaccatcattcttagcaaactgttgcaaggacaaaaaaccaaacaccgcatgttctcactcataggtgggaattgaacaatgtgaacatatggacacaggaaggggaacaccacacaccagggactgttgtggggtgggggaaggggggagggatagcattagaagacatacctaatgctaaatgacgagttaatgggtgcagcacaccaacatggcacatgtatacatatgtaacaaacctgcacattgtgcacatgtaccctaaaacttaaagtacaataataataataataataataataataataataataataaaatgctctagcaaacaaaacaaaacacaaaaacctgatggggacttagggttcattatactttctattattttggatattgaaatttcctttccaactcatattctttcattcccacttttacagtcttcattattacctcacagtgggtctcactggagattttattggtgtagtgcagaacctccagctctatgtccgtcttaaacactcggcactaaacgatctctgggtgaagaatggtgttgttgactttgaacttgctgatgccctcgaaggaagcctccctgcagacgctgctgctgtctgtgttgacgccacgcaaagtgaggaggacagagggcttctgtgacgtcaggacaatggcaatctcatctgcgtcctggacgtcgtccacggcatacttctccttgaagtgctccttggaatggatctttcccatccaggtggcatggctggcaggaagcctgggcacaaacagggccgacttcccagtgtcagcgtcgatgaagccgtagcagcctggctcggtgacaccgaatgcgcagtgaaagaaggactcctggcggaagaggaccccggtgtaggtgcagtagcgctgagtctcctcttagccctgcaggaccactactgagccggcctgcacagcagggttcttccgcagccgctcacaccggcgctgccggttcaaggcaaagagcgccagtggcaccttcagggtttccttccccagccaaaacgagggtccagtggccgccgccctgttcgcccagcaccggcgtcacgtgaagtctgaagtcactcttatccagttacatttgacagatgagaaaattaaagctcagaaagggtaagtgcattgtccaacatttccatccagtcaacgatgcagccaggagtggaatctggttctgttaagctctagagcccatcctcaagcactacagcacactgttaaatttgagtggtaaaggtggatggatggcctgttaaacagctcagaggtaggaatgagtgagttatgcatgggaaccagcagtcaggggcgaagaaatgaaccaatcggtcacaaaagaaatgattcataatgtggatccagaagggagatatttgtgaatggccaaaatcaggattcagtttttgtatgtattgtgacagataagagaaaatctctatgtgttcttgagtttaagagctgacacaatttgtgagattaatggtcatagtgctcattgtgaaaaacatgaaaacacatgaattctgcagttgttgcaacttgtgagatgcagtgagagcttgtgagatgtcagatttggccctgagtgaaagatgtaggagagctctttgttatgcaagtctctggcatttactgcaactgacttgaacaacaaaataaaagatctaaaaacactttgggaataggtatgcatcattctgaaagggtattactgacgataatgaaacttcatgataacagtgactaaactaacaaatgcagcagaaggctctgatctcctgaatgttcactagttgctcaagtgtaaaccaagggtctcaactctacctgtgcagccgtgtgcccattttgtagaggggagcatcaagatttgaagaggttaaatatttgctttacattatgcaattagaagttatgattggccaggcgtggtgactcccgcctgtaattccagcactttgggacgctgaggagggcggatcacgaggtcaggagtttgagaccagcctggccaacatggtgaaaccctgcctctactaaagatacaaaaaattagcctgatgtgatggtgcatgcctgtaatttcaggtactcaggaggctgaggcaggagaatcgcttgaaaccgggaagcagaagttgcagtgagccgagatcttgccattgcattccagcctggacaacagggcgaaactctgtctcaaaaaaaaaaaaaaaaaaaaaaaaagaagttatgattgagactcaggtctgtctgactccagctgttaaccactatgttctaagctctactatggtcaagagatatcctttgagcacatttttcaaggtaatatgataaacaccatggggaagagaaatcttaatcagacatagtatatacccttgacaaattcacagtgtactgggaaagtactaatctcctataatgcatggtggaaagtgataagaaaacaatgaattcagggatggagaattcacctttcagaaggctgcctggaggatgtggcagttgaagtaggctgtggaaaaggggtaagatggggctatactgcaccaaaagaataagaatagagaggaaagaggcgagtgttccaggtgagaggcaggccagcaacaaaaatgaagaggtggcaaacacaaggcagtttttggaaaagttaaatggccagtttgatgggacagaaagagtatgtgtggaagtagagaaaatgctgaaaaaaatacaatgcagatttaaatagtatgagtaataattatagctcatatttgccaggcacctaaaatgtgccaggcactgtccttggggctttgaatttattatctcactgaaaaatttctaactagactgtgagattgatattatccccaccctcattttacagatagatctatctgtaaaatgagttatcaatttatctgtaaaatgggggtgggaataacaccactcttgcagtctagttatttagagaagtaacttgtctagggccttatgaagatactggtgaaactgaaactcaaacacaaatttatctaatgctaaaattcttattcatgaaaccatatggtcacccagtaaacattactgttgatgccaaataaactctgctttagagccacagttttgatccactggtcttattttttttctcctctgatttatacatgtctgacatacgttgtcatttctctgcaaactttcagagaactaggagggaatagtaggctctaatttcatcctagtggagaaaaaaaaaaaagaaatggaaaatgagtttaattactctctgcgaaaaagctgtctcttctccccaaacttaacaatattaagattaggtcttcacatgctgctgtaagagaacggactcatccatcattagacatatcctggaagagggactgaggggattatttcctgaggctctggatagtatatcacttgaagcaccttataagaagggatactgtgcttggctttacacaggattgctgatttagggtgatcatacaacctggtttgccaaaaggggtctttatttatgtctattagcctggcataattattaatggcaccatctttactcccaagttgtaagagtttagaagatgaattatatggtttccctactgaaggtcagagtaatgagaggttagagcagctgccagcaccattgccttgggtgaggtttctgtctcacagggagttgcagccaagaatctgaaggattctgcttcttcacagtctggatgaataaataatgccgtagggatgtgagccctacccattactgaatgactgcgggtgtccttgactgctatccagagatagtaacatcaagtagtcttcttggcatttgaggggatgaactctgggtaggagaagaggaggggctgtactcatccatgaaggcagcagtttggggaataggaggatatgggctaagaacttcagtctcgggggatctcattgaattagggtcatgtaaagggagacacattgcaccttggtgatagaaggctccttagtgaggcatttataaagcccccgcttaatctcaggaagaatgtacctacgttggaacagttactcatagttattgaaatttcttaggccaaaaattaaaaagtgtataaatgaccacctatcttgggtcacttcttaacttggcatgctttattattattgatggtttggaggctattttgtaatgcaatttatttagaaggtatgtattgggtacctagaagatgctgggccactggggtcaaggctgagattggaagaaatagaaaccagaataagataatgttgttcttgttcataaagctcattctcagcatccactacgatataccatttaagcaaatatttaaaaataccccaaacaatactgtatgttgtttatggaaacattcatatataatggaagtacaaaaatatgcatgagaataatgcaacaacttttggatactggttaatcctaaagggagtgggagggaaggaaagggatggctccaggctttagctgtatgaaaagcattttattttggaggaggaggggtagtgggggtggggaagagagagagacatgaaataaaaatagcaacattttatcatccattatatcttatttaaatgtgtcaactcttaaaatataccagtgcacttttctaaatgcctgaaatattttataatcaaaaattaaagtaaaaaaggccaggcgctgtggctcacacctgtaatcccagcactttgggaagctgaggtgggcagattaccagaggtcaggagtttgagaccagcatggccaacatggtgaaaccccatgtctactaaaaatacaaaattagccatgcgtggtggtgcatgcctgtgatcccagctacttgggaggctgagtcaggagaattgcttgaacccaggaggtggaggttgcagtgagccgggatcataccactgcactccagcctgggtgacagagtgagattctgtctaaaaaaaaaaaagaaaaaaaaagaaaaagtgaaactgtctaaaaaaaaatttaaaataaaattgtacccaataaatgtatacaaccataatttgtcaattcacaattaaaaaaattaaaatttacaacagccttgtaaggaagatagacccattaaaatggatggcccttttgtcattacaaaggcttttccacaaagctggtgaagaagagagatggaaggaggaagagcgggcagagaagggggtgaggctagggctcctggggtcatggagtctatgaaaaatctgcaagtgtggttggaccatttcacaaaaagggatatctatacgcaattggaagatgtgtgagattctctaatgtgaacctcttcatctactcacatacaagggcctggtgagaattgttttttaaactgagggaagtgtcaggttcttatccttggtgattctggcacagaaagaaatagcatagcaggcacagaatcaataacctacacggttggttagctcagtggaagcggtagttgagagtcagagtagaccaaaaggatctacctcttgaggaattcacagacaacttgaggaagactttggattttcacagggcagggcttaagcatgagtggaattgaggccatcttccccaaagctgaagagcagggagatctcagtggaccctgggtgatgcgggactcagtaaacccttcaatgacagtcatgagtgaaactctaggaaaagatagggaagatattttcattaaaaaaaatttgtggatacatagtaggtgtatatatttatagggtacatgagatgttttgatagaggcatgcaatgcgaaaaaatcacatcatggagaatggggtatccatcccctcaagtatttatcctttgagttacaaacaatccaattaactctttaagttattttaaaaagtacaattgttgttattgactatagtcagtcccctcaagcatttatcctttgagttacaaacaatccagttacactctttaagttattttaaaaggtacaattgttattattgattatagtcaccctattgtgctatcaaatagtaggtcttattcattctttcattttttttttgtacaagatggggatgacagaagaaagacaggggtagataaaatgtgagggagacagaaagaaggaagtaagaataaaggcaaatgcatgtcataggaacttggagagaggcacttggggctccctgaggtctcactgagggatgcttgaggaagaagcagc[450 bp omitted]gatggagtaaggggtgagatgatgagggaggggcagggaagagggaggaggcaagagcctggaggacttcaagggaggagaagcaaaacaggtttcttggaaatgaaactgcttccccacaagaacagcctgatgtgataagggcaaagtaatgagaaacagacagctcacatttccctggaagtgcagagccaaacagcaactggattttgactgttcccagatcattgtattaacctaagtccctccccaggccccaagtgggaaatggggtgggggaacctgtcttcaaaggctccccactgactccatggcaaagagctcaaacagcaagctctcctctctccacctcccaaccaatattgctcttaccagcattgcaaatagggggtgaatagtcctccctcagcccactgcgtccttcttccaaatctcccctcctgtgtcccccacagctgcttcactaaatcatccagctcagaaagagctgtccacatgcttgccacttattctcttgctgtgtggagggcttgtctaattttaagaggcagaaggtaagtggaatctccaatttcatacagcttgctgggagaaggcctcatttgatagcccttgttcaagggagtcagtggtgggatctgacgttggatcaaacggattacccctcccaccccctcctaacccaatgttttggccgagctccccctaggcaggatccccagagctttctgccgcttgtagaaaaacagtctgacttcttgcaccatcaaatgaccatggtttctgaaacctggcaggagcagcctgcttctttgccagctggaaaggggaaggggcaggtctgtaagaagaaagtgagaccttgacttcaagctgagagatccatggacctgaaaaaacaaggccaacgttctcacccagagtcctcatcagagcctaagaacaaaactaggggcaattccaaagcagagacagctatgcaaaggcaaagatggacatctgtcacttcaacgagagccctgctgaggaggttaaaagaataagaaggggccgggggtgtcgacacacatgtgtagtcccagctacttggggggctaaggtcagaggattgcctgaacctgggaggttgaggctgcagtgatcatgattgcgcccactgcacttaagcctgagagacagactgagaccctgtctcaaaaaaaaaaaaaaaaaaaaaaaaagaataagaaggggtagtaatgtaaatttcccattttgctggagactggtttctccacagggtttcctcacttgatccagatggcctctagatttcctagtcctagatccaacttggtggaacatgagctctctttttcttttgtcatggagcctgcgcagcatattgttcgaggttcagattgcctgtgagtgctaagggctctaagtagtgagctgggtactgctgggtgactgtggaaagaattgaagtcttgacctgtgggctaacagaagaaggacacatggattgatttacaaatggcttagtttagactcacaaaggtgctcagatgactgcaaattaaaaggaaaagcatggggtacaaagaaatctatgtatctgacacttgagaaacaattatacaagagtcttatccactagaattaaaactctattcggttaggggttttgatttgtttgatttcttgctgcatccccagtgcctagtattcttcctaggcgtactgaacatattagacactcaataaaattaatttgaatgaacacatctattccagcaccaaatcttctttcatagtaatgcttgttagaaatattttctaaattttatttatttatttacttactattttttacagatatctctctctgtcacccaggctggagtgcagtggtgttatcatagctcactgcagcctccaaactcctggactcaagcaatcctccctcctcagcttcctaagtaagctggtgcataccatgctcctggtgcatatcaccacatctggctaatttttcaaacattttttgtagacatggcatcttgctttgttgcctaggctggtctccaactcttggcttcaagcagtcctcctggttcaatctcccaaagtgctgggattacaggcgtgagccaccgtgccgggccttctaaatttcttgtaattttatagcagctggaacagactcagacaattgtcatcttaagtcacaactgcaatatgcatcttgccatgccagacttcagtgttgctagatacagcccagcaaaggaatattacatggcaattaattttgcattcaagaagagactgtaaatctgttcattcaactaatattaattgagatcttacttgagccaggcactctaccctgctggagtaaggacttcattgttccttccctaatggagactccagtctggtggaagtgagaggcatcattacttagtcaaatgaataaatatatcattacaaatcataatataatgatgatggtagctaacgtttactgaatgcataactgcctgctagggattgtgctaagcattttgcgcgtgttatttaatattcttaaaattgaagtagccaggtagccgggtgtggtggcttgcgcctgtaatcccagcactttgagaggctgaggcgggtggatcacctgaggtcgggagtttgagaccagcctgaccaacatggagaaactctgtctctactaaaaatacaagaacactgaactgaacgcttgttgggatgacctgcctgcagagaggagctactgtctctgctaggagctgaactcttgtcaggacaccctgactacagagaggagctgcccagtgtgggtcttctctgagctgttctattgctcaataaagcttctcttcatcttgctcaccttccacatgtttgcatacctcattcttcctggttgcaggacaagaactcaggacccaccaaatggcgaggctaaaagagctgtaacacaaacgtggctgaaacatgccccttgctcaccacgttgtgggtgaagagaaggagagaaaagctgcagcccttcagggagcccagacctgggagctccctgagtcagggctatgactccctctttggggccctgcagttcctggcatctccaagcttccaggcaccactgcattccctggtgccagctggagaagctgcttccagtgtgcctggtcagccacagcctcacagacagctggtgcccatgctggcacctggagctgcctaccctgtggcagcagcaggcgtgtctgactacacagtgactggaccccatgctccctcacacacccctcgctcactcacacacccctcgctgctccatgcctgactctcagtctcccttggagacatgggatccaggctggtagcatgagctgagtgcagcctgccaggccaaaacagaggaacaagcccagcgggcctgagtaaaactcgggcaaaggcgtcactggccacaggtttctagccagaaaagtgacaccccaaagatctcgtaacagtaatttacattcccaccagcagtgcataagcattcccttttcaccatatccatgccaagatctcttgttttttgactttttaataatggccattctggctgggataaggtggtggtatcttgtggttttaatttgcatttccctgatgagcattttttttcatgtttctttgtcatttgtatgtatcttcttttgagaagtgtctattcatgccatttgcccactttttgatgggattattatttttttttctggctgatttgtttgagttccttgtagaagctggatattagacctttgtcagatacatagtttgtattttctccctctccatgagttgtctgtttactcttttgattatttcttttgctgtgcagaagatttttagtttaattaggtcccatttatttacttttgattttgttgcatttgcttttgaggtcttagtcataaattctttgcctacgccaatgtccagaagagaaaagctagtatatttttgaaacagaaaggcggtgaatgatgtaatgatgattaatcctatggcccattatgctcaaatataagagaaccaatgccacaattaaaatataaaactcaaaatttatttttccactcttaactttaagattagtagtttacccagcactttgggagcctaaggggggcagatcacaaggtcaggagatccagaccatcctggctaacacggggaaaccccgtctctactgaaaatacaaaaaattagccgggcgtggctgtgttcacctgtagtcccagctacttgggaggctgaggcaggaggatggcatgaacccgggaggcggagcttgcaatcagccaagatcacgccactgcactccagcctgggtgacagagtgagactctgtctcaaaaaaaagaaaaaaaaaaaaagattagtagtttaatatcagcaaaacaatattatccatcacattaaagtaatgcctctgatttgaactttattagctgagtagagtttgacatatttattttataaattggtgtacgttatattgttgtataagtataaagagtttatgcttattttatatttgtagatatttaagtaaccttatgataaaaataaaatactgtaaatcaacactagttttttacactagtgatttacactagtgtctgtgaaacttttttcccctctttatgggagactatttgttactgaattttgtgatgacaatattattttaatttttctatatcaaaattactcatcgatgatatactgactggcactacatactaatgactgtcatttgaacaataatcacttcgaagctctcccctccaaatgcacagtgcatatgcataacatgtatgagtctatctacgcaatgcttttagctttgaaatgcatattcgctataactgcgtttatcaaaattttatctaaaatatactacatttctactatgtttaatatacatatgcagattacatcatggaattataacaatagctctatgaagtatacactaatactggacccattttgttggtaagcaaggcgaggctcaaagataaaaagggaattgttcaaggttatagggttagtgacacagagaagggattcaactgaaacaatatgactctctatatgttctcttaaccatcaacttttgatagcttgtcctttagtaatacctataatttgtgtatagattgattttctccattagacatgaactcttgtaaagcaaaaatagtgtcttaattttttaacaactttaattgaggtaaaattcacataccctataaagcactcatttgtataattcagtggttttgtgcatataacattattactttttataaattgtgattatatataataaaatttgtcgtttgttcattttaagtgtacaattccgtgacattaattccatttacaatgttgtgcaaccaccttctctatctatttccaaactttttcatgaccccaaacaaaaactctgtaaccattaagcaataattccctattcccctcttccccaacaccctggtaatctctaatctactttctatccttatgaatttgcctagaatggtacattattgatctttattccccattaccttgaacagatgccaaacttgtaggaagtggtcaatccatatgtgttgaaccaatgaagaatagacatgttgtccttgcatctttgcctagactataatttttttaaatgctccttattcttctgcaccaacattccttcttataccatcttcatttacaacccagtttattaacttatcctctctaggcaactttcctcttgtccatgcccttatgccgtatcatccagaaatatataacatactgcttcagctgcacagaggtaaatgagctgataaaacagccaaagattctgagataaatgaaaaaggctcccacacaatcaaatgaatgaccatgactaagggcatctcacatgagcatagatgattaaataccaagtccctgaaccgctatcactagaaggtatagaaaatgaattttctgtaagagttcacatctttaagcaatgagagatgcattttcaagctgaactcacctgaatgtcactctctgtcaacaaaagccatggaggtaaccaacaacctcttctttctacagtacagaacagagaagggcaagaggaggagcaggtgtagcagagaggcaacactaggacacgttgtttctgaagtgatttacgaatgacaagtagaagtagtgaatacaaaatgaaaattagaggaggtagttcttccagttgtttaaaaagagagagaaataagcaacagctgcagcttgtgttctgctatttgaaggtgaactcttcctttagaatttcagacttttagcaacagcttagcggttgaaactacagaaatgatgttgatacacttaaattcagtactttcagcagttgcaaatagataaagaattttctgcattttatataaagccactgatagaataaagtaatagtggccaggcacagtggctcacgcctttaatcccagcactttaggaagctgaggtgggtggatcacgaggtcaggagttcaagaccagcttgaccaggatggtgtaaccccatctctactcaaaatacaaaaattagccaggtgtggtggtgggtgcttgtaatcccagctactcaggaggctgaggcagagaattgcttgaacccgggaggcggaggttgcagtgagccgagatcgtgctccggcctgggcgacagagcgagactcactctcaaaaaaagaaaaaaaagcaatagtaatatatggatccatatattaaaacaataagtaatatatggatccgtatatattaagacaacaagtaatatatggatcaataattaaaacaaagaatgggatcaatggactattaaaaacatgaacaaggtgagagagatgagaggggaaaggaaagaggggagaatattcaaaacatgaacaaggtgagagagatgagagggaaaaggaaagaggagagaaaaaagagactctaggacataccaagacagacgttttgccctgagctacacctgaataagaattcactaatttcttaaaaacgaggaaatgaaatttaatactggaacactatatatttcttttatatcatatgtatagatttatgcttaggttaacaacttagtaaagtgaatgttgtttctcccatattgtggattaagtcattcttaactaataattttgtggtctttaaggagtcccagatcaaatccatacctgggtcacttgtttgcaataggcattataaaaaattatattgaagattctgttgctaagctaagcagtgccctctgaagattgttgccttgacaaggataatcactcttggaggagttagacattgcagaggtacttgatgggtgacctgcatgggccctttctcagagccttattaccatgtatttttccaaacacttagtagagataagagttggcctcataaaccttagttatattcattaggtcctaggccagtttattctttcatttaggaaataggtattgagtatagactctgcatcaggggctttactgtgtaaaatgctgggagaccatgagaatacctgtcagtgtacaattttcaaaatgttaaaaacataattctcatgaaaaacacagagagcaaatgtcaaagttgtatttgagtcattcatgagggattcatcaagataatcaagccgattcaaagaaagatatggggtaaaaaaaatatatgctatatatacatatatgaatacatatgtacatgtagaaaaggagagagagatagaagaagagagtcagtttaaccaaaaaagtgctggaataagatttctaaattggattaaaaaacagtcaatttctacagtatagtaaaatcataactttgggggtaataattctgtctactagacaaaaatcatttacatattatcagtttcctacaagttcaaccttaactttacagagtctggccctttattaaggtaaaaagtacatcaaatgaaaaccagttgacccatggacaggcttattacccaatgctctatgacatggacagaacacgcagtcatccttctttccttatttctaagttttgggtgatctttcttcacatgatgaacaaaagcagagtctctacgctcacggatctatcacctagtcacattatcattgcattactgattacgcaaatacatggagatttcaactgtgttgagagttgtgaaggagggtacacaatggttataagtgtttacaacagggatttttctaagcaggggatcaggaaggcaccagtgaggaaggagacaccagagggggaaacactggggaacactgggcagcagtgaaccagatgggccctcatttcttccctacccacacatctctccatggctttgagcaccatgtatgtgacgatttctctcacacgtacacatttagtcctttctctcctcaaaacttcagacctgagagttcacttggatggcacacaggcatctcaccttggcatgttcaaagcagaattctcagtcctgctcacaccaaacatcaacccttctcatagcctttctgttttagtaagtggcaccaccgtccctccaattgatcaaaacaaaggtttaggaattctttccgattttcctctttccctcactccccctaccccaaagcagtttgtcagttaacactgcctgctcctcccttatagtatgcaaaatccaccactttcacaccactacccagggccaagacatcaacatcccctctctcgtgaactatttcagtgtttccaccaagacttcattctccacttagcagccaaaaggtaaatctcagctaaaaggtaaatcctatcctgtcgctcttctaaaatccctccagtggtaactggaataaaatctaaactcctcccactgactcacacagccctacgacacccgacattcataacttttgactcaactgttactatttccactcccaccccgagccccacccctaactccactctggtcacacaatccttctttcagttcttcaaacattccatgcttattcccagctaatggcctttgagcttgtagttctctctttctgacatatttttccttgttacttttgtctgtctgtctcctttcgttatccagatctcaagcttaaatattacatctttagaaaggtcttccctaaccacccaatccaacctacacctagtttctctccatcagatcttttgactttaattctctgcatgatgtcatcatgagctgctatttcttcttgtttacttcctcttttttctctgtctgcccttcccaacccaacccctccatacatgtcttgaattttagttgtaactccagtgcctacaacagtgcctaacacatagcaggtgctagaaaataatttttgaatacatgaacaagcaaagagggaaaggacaatcactcagacaaaaggagacaaaaggagcataaaggactgaaaaaaaatattcagcgtagtgagaagctgggagcacagagagtaggagggagcagggtgaaaaggacagcggagagcagaagcctccagcccacgcagcactcggagggattttaaggagtttcatcttcatccaaatactaatgagaaggcagacacagggctgagaaaaggataatatgctagtgatcttgaactcaaactgaaagagacttaataggaaaaataaggccactgctgtagtgatgggcccccgggtagtcagagcagaaatgcactgacccacatcagttcatttctctccccatggcacacacagtcatcatcacttccagcctcgccaccatgaagtgaacaacagcccgtggaatgaactttcacttcttcaagagcataatgctgctttccaacccaggcccgccctgcatgcggtttcctctacatacaaagctcctccaacttccacatgcctagttaactccttttttccccttcatttctctgctgaaacctcatttcctcaggaaaagccttcttggaccctctccccgcaccatactgtgtcagggcccactgttatagttccctgaactgtaactccaagaaattaccattctttctttcacagcaggaatcagtatcacatgcggttgaaaatgaaagctgttagactgcgtagcatcccacattttctacgtggtagctgtgtaaacataggcaaattatataatctccttgaagacttcagtttcattatctgtaaaataggaataataatagtccctacttcaaaaattttttttttttttttgagacggagtttcgcctttgttgcccaggcaggagcgcagtggcgcgatcttgacccacagcaacctccgcctccgggttcaagagattctcctcctctcaggggaggccttcccatgccccgacagtgcagagatgcccgactgtgcagtctgggtttggtggctgcagctgtgcccgagggggtggggctccttcctgctctgtggagtgggaggcccgagtctgcagccatgacttgggctgttgtggctgcacctggggaattccctccccatcagctcggaagtgttgtgattcccacttgttgccagctccacggagtgtgcagccctggctgagcttcgctgttgcagccagcgtaatggcagcggctgccccagatgggctgcaggcgccatcattagcacagccctctatgaaaagcattatggctatttctcaaagaactaaaagtaaatctaccattcaatccagcagtcctactactgggtatctacccaaaggaaaagaagtagtgatattgaaaagacacctgcatgtatatgtttatggcagcacaattcacaattgcaaagataatggaccatcaattgataagtggataatgaaaatgtgttatatatacaccatggaatactactcagccataaaaaataaacaaaatgatgtcttttgcagcaacttggatggagttagaggctatcattctaagtgaagtaactcagaaatggaaaaccaaatatatattctgacttctaagtgggagctaagctatgggtacacaaaagcatacagagaggtataatggacactggatactcagaagtggggcgagtgagcaggggtgagggatgaaaaatcacatattgggtacaatgtacactccttggtgaccagtgcactaaaatctgacttcaccactatacaattcatccatatgaccaaaaaccacttgtaccccaaaagctgttgaaataacaagattatatgtatatgcgattatatatatataattatatatatgtgtgtgtgttcctggtttattttatatatataatttatatatatacatatatatgtgtgtgtgtgtatatatgtgtatatatataaaaccaggagaaattctaactgggctaaatatataaatatatatttataatttcttgtttgtttgtttgagacagagtctcactctatcacccaggctggagcgcagtggcgccatcttggctcaccgtaacctctgcctcctgggttcaagcgattctcatgcctcagcctcttaacgtagctgggtttacaggcatgtgccatcctaccctgctaatttttgtaattttagtagagatggggctttgccatgttgaccaggctggtatcaaactcctgacctcaagcaattggtctgccttgacctcccaaagtgttgggattataggcgtaagccactgcacccaacctataattgtttttaataattattataggcattacagcccaaaaaactgaatgacatttcttcacatgaatctattactcttacttatactgagaagtggatatcatagcatccactcacaacttaacagactactgacagacacagcacaaggagttttgcatttaaggtatctatgtgatgttcttctacgtgatgtttcagttttcaattcctttctctgtacaactgtaaaccttcaattaaaaagtgctctgtggggtcatttggccttcacttagtgctaatgcaattagcgtcacaaaagcaagggccctgaaattgtatggaaaaactctgttatccagtggtcatctagaacaggcagaatgtttttagattaagttcagtgatgtattatcattgaagtgaaaacagaatttaaaattcacatggaactttcagacctcagggtgtgcttttgctgatactcatgtgtgtgcagttgacggtttgttacagtgctacatattattgatgttccagtgctctttttgtatttcctctcttcctaagcttcctggctgacatagcctctctgtgcatagccttctacaatcatcatgttaccatgcaaatgaaaagtctagttatatctatatctacatttatctgtccttttttttttgagacagggtcttgctctgttgcccaggctggagtgcagtggtgcgatctcagctcactgcaacctctgcctccaggttcaagtgattctcctgcctcagcctcccaaatagctgggattacaggtgcacaccaccacccctggctaatttttatatttttagtagatataggatttcaccatgttggccaggctgttcttgaactcctgacctcaagtgatccacttgcctcggcctcccaaagcgctgggattacaggtgtgagccactgtgcccagcctgtgtatttttatgtaaatttaaggtaaaaagtagcaccattgcgtgccttttcaaaattgctctttgttgtatcttgcatattattcctcactgatgagaaattctgataagataaataccactgagcaactataattcatgggaatactttgtttaaggttcatgcctaaatttctgtatcacagattcccaagtctgaaattatctgaaattatagcccatatccaaatatgcagccgctaaactcaagttagaactgtgattctttcttagctgcgtctttattttctgtaaatgtgagaggattgcataaaataatcactggcactatggttaggccaagtattctttgattctcaggtttctcatctgatttaattaatcttttttatggactacagtaatgaccccactggacaagacgattcatgaggattggaacttcatctattttctttatgctttattcctcagcatgaagttttgcacatattaggcactcaataagtaagtatagaattagcatttattgaatctcaataatataaccccagacatcagatttgtctctattcatcagccacacagatctgatcatgatattcttccacttcacaatctctgaatggactcgcattgcctacttagaaagtgaaatctaaatcccttccaatggcatctaagggcattcacaatccagttcgccgtacgtgatgatgtagtaaaatgtcagccaggaaacttaggaagagaggaaaaacagaaagtattagtaccatttccgccactctgccctctgtacaacagccacattaaactatttattgtgacttattattatgactatgaaactgtcatttcattgctccatccaccaattttgaaagtgatacctttttacaagtttgatttgcatctccagtaaatgtagagagctgagatttccccacatattttaagtaaatgactttgtttttgtcatttttgctatgggtatatgggtatttcattttttctgttattaatatgggcattttgctgatttggagcttgtgtttaattcttaatatatgactactactaatttttatgataaatcctttacataatcttaacactccattcatttgttcttttaactattgtttcataattttttctttattttaaaatattttagtttgtgtaatccaaactttttctggaagtctgaaaataatttatcttctctaaacaatgaaaaaatatatgctattggttatatgtgttttacattaattattaatattccgctattcaaaatgtctgttcaatttctcctattagtttactaaatttatacctatgatatctgtatgcatttagcaaaattaaactttgaaataattaaaaatggtataatttagcatttccaacttcttcctcttgctcttatttttatttgatctgttgctaactatatttcctttggcttatagttgaatgtttgaaagttcaagtttttcttttttatttccacttggactttatcttgtcatttttaagctaaagaagttaattgctgaattttttgagtcctcaaaaaagcttactgaaagtttatgggaaactgaaaagatgtggagatttctaggcagctgaaagttttaaacatttttttacttattgtaaaatttccttccttccttccttctttccttccttccttccttccttccttccttcctccctttctcactttctctctttctttctttctcataatcttgctcggtcacccaggctggagtgcggtggcatgatcttggctcactgcaatctctgcttcctgggttcaagagattctgctgcctcagactcatgagtagatgggactacaggcatgtgccaccatgcccagctaatttattttattttttgtatttttagtagagatggggtttcactattttggtcagggtggtcttgaactcctaacctcaggtgatccacctgcctcagcctcccaaagactgggattacaggtgtgaaccaccgcgcccggcctgtaaaagtagtttctatactttcatttaactggacaatccaaataataatttcattttcattcatgtcaattgagaagtgcagtaccacattccctgacatcagggaactctccatctagttaggagcgcagaagaggaacagataatgaacaatactgcaattcattaagggccctgctagctgtatgagtaatgcactacaggagtgtagaggtaagaaattatagcacttaacctttctgaagtagagaattctatgatgacttcattaagaaaatcaccttcccagaattttaagactgagtagatcacagccagtaggaaaaggatattttacctaggtcatactcattgtattatggcttggaagaatgtttcctttctaagtattttacttttagagaggtgatagtgcctttgatttttctcaatgcttttgtcccttggctatgctactgagtgtgaacaaatttcctattgtctaagggactggtcatgagatataggataccactgttataaaactgtttctttctagggtttttgttttatttactaatgggattcatccagcattttccagtgttttccatggtaattagggctgaaggatgcgctaaggaaacaaaagttcaaatatttgcaaatagccacatgtgattcctttcttggagattaacaatgcatagctctaacagtgaggttaaaaaatcatactggcaggcactagatttcatctttaaaaaagtgttgtatttctttcataaaatacctttataagctgctaggagaagaaagtgtggcaccgaggacttgggttagcaagatacaaaatcgcgcaagagacaactaactcactgtgcattggaaatgcaaaggaatttgagggtggaagaagagtagagaaaatttgagggtgggagcaagagaaaggagaaatgagtatgactcagtgatgtggtggattttagttatttgcattgctgccatgtctgtttattatagtctgttgcacacaccaagaacttgtacaagaagaatgtaactgatttttgcatgtagatcaacaccagactggaattagagtaaggcacagtaaagaacaaagattcagagaaagccagaagacagatccattggtgattacaggcatgtaaaccttgtagtatttcattgaaatcacggggaagataatggattttacctcaaggcaaaaagaaggggttcatacaatctttttttaatcttaaaatacaggagaccacagctggcacggggattgtatgcatgcagtaaatgtgttatttttataatcagattaattaaagattctgtttttatttctaaaaataattctcaaattttgttttgctctgataggcttttggtaggtatttggcagcagagtactccacaagactatcttctccaagattataaaccccacgaagtgtctggaatgtagctatttaaggttgcctattacaaatacacatgtcttagtagatagtcgagctgaggtaaggctgacatttttaagtgcaaattgttaagtctgagaagcacaggtgatgaacacaaggatatctcaccacttctattaggtggcctaaaggagtgtcctcagttcagcatctcacaacaatcaatatattggtttaggcttaaaacattctttaacttattcctgattttcttttgtttgggagaaccagggagctggaacctcacctaattgcaacttttaaggtcattatctattcttgaaaacgtattcatactgtttatatttcattttcaaccatcttgatccctggaaatacactgtttggtccctaggttcacctatcacctttaggtcatgaccacaggtctacagatttaacctccatgccatggattggccttggacctagagttctcttagatctggtataccacagcttcctggaacttctcctggtgctttgcttctacccacatgggtaggtgctttgcttctacccaatctctgcctcaagagtccaggtagcataggggttaagagtgtgcaattgggtgccaaatggttgacttctaatcttggcttggctgtttagtaacagtgattgtgtaagtgatttgacctctctaactctcagtgactcatctataatgcgggaataaaaatacttccttcctcagagattgttgtgaagattaattagataacgcatgaaaaatcctagtacattctctagcatatcataagtgttcagtaaacaaaagctgtaactttatgtattatttcaatttctattttcctcctaccttctttggtgcttttgttgggctgacaacagagcctgctgaacctccatcagttcccacactttcccttcttgtcagcaggatgcagtagaaagagcatggacctggaaatgtgatagacctagttcagaactgtgcttacacaacttttgtgaactcatggccttgtattgtataatatttaatgtcctgaagccttagtttcctcacctataaagtggagataataaaacaaacttatagaggttgttgaaaattaatagatatcctcacccttcccactccagtgagcaaggtgccttgcccatagtcaattgttattgaaaacaagcaccccactttttcctcgtatctaaatttctttcagattccacccaggtcatccaaattctgatctgggatcaacactgctctcctcctattcctaccttaccagaaaggccatatctttaggccttatgcaaggatacactagtagaatggtgaaaacctggatttgattcctacttttccccatgtttgtgctcagtaacttcaggtaagtttttaaatttctgacatttaattttcttcttcttaaaatagagagaatgaaactcatttcaaaaggttgttgtggagatcaacttaaatttgcttacgtagtaaattttgaacacctgctatgtgccagccatagtgcaaggtactgggatttcaatagtgagccacctagagagtgcaagtgtatggtgcttagcacagtgcctggtgtacaggaagcatgaacatgtaatgtatgtcatcatcatcatcatcatctccacatcatgctacataagcacagaataattcaataaattaattacaaataaaataaatacattttctataaaatatatttatataaaatgtaaataaaataattacattttaaattctctaatccaaatcaaaataaataaatctttgaattattataggaattcttgggagatatgtcttctcacagaggtttccgtgatccccatgagcatctagctacagttaaaagccacagtaatgtaaaaatgtattcaaatgatgccaacatacaactgaggttgtaaaccactggtgtagagtctactgtagtgtagttagtacctgactgaaggagatgagtaggccaggttgtcctaaagaactaataatattttcaaaattaagtgattgaacagtggaatggataaattgtggtatattcatataatggaatactacacagcaatgaaagagatcttgttaaatgtaacaaagaggaaatctcacaaatattatattggccaaaagatgccagatggcaaaaagagtacatactgtatgattcaatgtatatgatgacaaagacagacaaaactaatccatgatgacagaagtcagcatagtggttccctccagtggtgggtattgattgagcaggttatgaaggaagctttatagttagatagacagatagataaacagctttgtttaattcatacacacatacacatgtgtgtgcacatgcacggaaatttaccaaggtgtttattgaagatacgtgtacattatcaaatgtaacatttacatcaataaaatataaattaaaaattaggtaataaatatctgcattagtctgttttcatacttctgtaaagatactacctgaaactgggtagtttataaaggaaataggtttaattgactcagttccacatggctgggaaggcctcaggaaacttacaatcatggtggaaggtgaaggggaagtaaggacctttttcacatggcagcaggagagaagagccagccagagcagggaaaactgccttataaaaccatcagatctcatgagaactcactcactatcatgcgaacagcatgggggaaactgctcccattatccaatcacctcccaccaggcccctcctttgacatgtggggattacggggattataattcagtatgagatttgggtgggatacagccaaaccatattggtatctgtatagacctctcactctctctgatatatagtgtgtgtgcatatatataaatatacatatatattgtgtgtatatatacatatatagtgtgtgtatatgtatgtgtatatatacatgtgtgtatatgtatgtgtatatatacatactatatatgtatattgtatatatgaatgtatattgtatatatatagaaatatgaataataatatatacatatttctctctctctctctttcttatttgcctttcagttcttgcttggttgatgctggcatcattaaatttttatcattaaattttgtttgtgttttccaagtgtttttactcttctctgcctttctcaggcttcccagcagcacttagtgaggaggaggctgatcaatgggtggtggggaaagtagctgagcaaacataaaggtagacttgaacttaaactgcactgtcaatcgtcagtcattcttaaagtgggtcatctgtatatagatgatcacttgttataaggggatgttaacaattttttcccttggagttggcagtggagcactggggtgtctcacactggcccagaagaacatagaataatggtagtgacaagatgcaggtttttagttctccaagttattatctgagtatgtgataatggccttgggtgtgttgggataggatagaggtaagaatagggaggaaaaatacgggctgagaacactttcctacatacagattttggcatctgccatccttttctttagatttggttgataccagagagggtaagagatggtgctggcccaatttcctgtctctttatgacttggcagtggagagtggccatgctggtgcctgtgtagagtatggcttgctcccagaagtttgaaaaagaaagtaatcgataatcagacactcactatgttatatgtgactatgtgctctgaaaattcacttcccagctgggcctgcagccatggagaggagaagagtggaggcaatcaccaaggtctataatggattttttttttttttaagagcagatgagaaggagaaagagagaaatagggctagaacaaaagagaaaatagaaactgagtggtgctgggaaggtagaaaagacagaaaccaattactaaagaatagctgcttgacaacctccaaatcataattaggagagacttcctggcctcacattttccacataaacactcaggcactgggcaaagttaatgggtccctgactgctgcacaagagagagcctctgtccaaacccagcagtgattgacgtcacagacggagtgtctcagagtaatgtgctccgctcccctcatttatatgtttgaccctaacctttcccagatgtgcaactgttcttccttccaaaaaggggctttcaacactgggcattgtgtgctctctgaatccagccctgcagcaaaaacaaaagtccaagttcctgagttttggaactggacttgtgagttggagtatctctggactgtttggtgtcccctctggaagctcgtataatggggtttctgtgcttatgtgcttgtgatctcatgcctcgagctgctccttagtatctggctggccgcctctctttggccacgaagaggtgggagtacgacaaggcacaaacaaggtcttttatgatctggttccagcctactcctccactcctgcctgaactcctcccattccctggttcgaggcacagatatgatttgccattgtactaagacgtcttggtgacccatggtcctgtggctttccctaccttgtttaggctactctcttacccaattctctctctttgatttggtggacaccaagtcctcattcagttaggaaggtagtgcaaacttcctctattcctggaagttttttctaactcccttccctgtcccctcctagtttgaattggctgcttgctttgtaactctccagcgctgctttgcaagaatcttcaccttaacctcttcactattggtgtgtttacctctctctgctttatgtttgagttagttgttcatgtgtctgtttctctaactcagttgtaagccttttaagagcaaggaccagatcttgcccatctttgaacctccagcatttagtacttagcctggtatgtaacaggtattcagtaaatatttgttgaatgaattcatgaatattgccaaggaaatgaggatgatgatgtaacataagttatgtacagtgtcttgatggccttggaagggttagtattaacaaaacatcaagacttgttacctctaatgaagaacagcataggaaaataaacattaaatttatacaatagggacaattactgctgctattacaggtccctgttacttcctaagtacttaactgatattatctcattttcttcttaccacatcccttttccaagtggcatgtggattttataattattgtttatattatttcaagtttcttgacaacatgattttgtagcctgcagtggagacgtgttccaagacctctcaaccctttggaaagccctaaatccttttgctgcaaagcaagtatactatctattacaacgcagctaaacaaaggattatggcttcaaaaatccctctgtgctttttacatgaaaatcaaacttcccttcccctgtgcacttggagttaccagccctcctttccccaaatgtaagacttctgatgtaaggccagattcatggagggagagcagaggccaacagctgggtttaattagtatgcttttgccctcgtatcttgaaaaacctatgctccacactaggctttcatttgagagaaagggaactcgagttgtaacaaaatctccaaatgcagaagaaatgaagagagggctgaggaagcatttgcaccaacttgccttcctatgatctgactttggtctatctactcattatatggtcctctctcccctcctcctcaaggaatctgactccagttgtacagaactcaaagaaagcagaggaagtcttgatgctgttgctttaaaccaccaggaggcaaatatctcttttctagtgatgtaaagatgatttcaggacttattgtagtcagagggctagaggctccaaggtatctacttactaccattttcaattagtggagttgggatagagaaaaaaggagtggataagagggagagaaaaagaaaagtccacttacctgacctccccctggaatctggtgatctgaccattgccagaaatggtaatgtcttcctatagtgaaaatttttcagcttcccactgaaagatgtctacagatgtccatagcaatgttcaaattgttgcctctctttatagataagtagacctgcatgttagcagagttaagggctaagtggattaggcccttcagaattgttcagaattcataactatgtaagataatttataaattatgtaattaatgctaaaaccagtccttaaatattttggtttcctttttttctatgcaagcctccttaacaactatgttcactgaaacaggataaagtggctttctagtgttatggggattttcccaaggaagctgtgaatttatgaagctgggagctctgtaggaaattaatattttgaatcaggaacaaaagatgtgtgtttttccagagttatggtggctaggaatgtgaagattacactctcccttgtaatttcaaactctttgttattttctttaaatgtaataatgttggacatagaactttagcttatgaaagctttaaaatcataggataagacttccatccacttaaactttggttgactgatatttccaagtagataaagctgaaagaatgatgggaaaaagtaaaaataatcctcagccaaatcagatagagggacaagaggagagaagggaaaagagcaaaacacaaacctaacacaccaaaaaggagggaggaaacctgggaaagtgaagctatcccgattacttccccagtcaggaaattattgcttagttaatttaatgggtacagggaagagcgaagtcaacacactatggtccagatgagagatttaactcccacttgcaaaaaaaaaaaaaaaaaaaaaaaaaaaaaagaaacattccactccaatgacagtggatagggaagaataataaaacttagtagtgatgttttagggattatgatctactgaattactgtttctaacagacatgatgtgactatatgcgaagcatgggtcaggtatgtataagaatagagagaaataggtcacttgatcttccatcaaagtggccttgagttttctgaagggatatgaattaatgagatgaaaaggtagtccagaaaaactgagtgttggctgagaataagtcccacccaccctaaggttccaaactgcatagctggcattatgaaccatttttctctcctgtccccgtgtgtggtagatgctcaccctctcattctttctagatagcctttatcagattaaggaagttcccttgtattccagtttgctaaagatttaaaaattattcatataatactaaaaagttttatgatatctttttcatctattaaggtgattatatgagtttatttttctttattctcttaatttgcggaatcgtattggttaactttagtatgaaacaacagggcacgcccagaataaacgcaacttggttattctttttgggagattgcagaattggatttactaatactctgttgaggatgtttggatctgtgtacatgagtaagagactggcctatacatttccttcttcataaatccttggtgcatttagcttagtattatatcaagattctattggcttaaaaatgggtttataattgttttctcttctactctctggaagagtttagctaagactagttttgtttctttcttaaatgtttggaaaaattcactggtgaagataccagggcctaaggtttttcttcatttattaattagtattcaacttatttaatgagtacaggacatttgtacatataaacatatatgtatatgtttatttcaataccttttggggtacaagtggtttttttggttacatggatgaattgtatagtggtgaagtctgagattttagtgcacccgtcactcgagtagtgtacactgtactcaatatgtaagtttatatctctcatccccctcctactctccttacttctgagtatttaatgtccattataccactctgtatgcttttgcatacccatagattagctcccacttagaagtcagaacatacagtctttgattttccatttctgagttacttcacttaaaataatggcctctacctctagctccatccaagttgctgcaaaagacattatttcattctttcttatggctgtatggtagtccatggtgtatatatataccgcattttctttattcattcattggttgatgggcacttagattgctttcatatctttgcaattgtgaattgtgctgccataaacatatacgtgtagttgtcttttgatacaatgacttcttttcctttgggtagatactcagtagtggggttgctggatcaaatggtagacctatttttagttctttgagaaatctccatactgtttttcgtagtggctgtactaacttacattcccaccggcagtgtataagcattttcttttcaccacatacataccaagatctcttgttttttgactttttaataatagctattctggctggggtaagatggtatctcgtggttttaatttgcatttttctgatgattagtgatgttgagcattttttcatgtttgttggtcatttgcatatatcttcttttgagaaatgtctgttcatgtcattttcccactttttcatgggattatttgtttttcttcttgctgatttgtttgagttccttgtagattctggatattagacctttgtcagatacacagtttgtaaatattttctccatctctgtgagttgtctgtttactcttttgattatttcttttgctgtgcagacgctttttagtttaattaggtcccatttatttattttttgtttttgttgcatttgcttctggggtcttagtcattaattctttgactgggccaatgtccagaagatgtattttctatatctttcttgcatttattttggaaactatatcttcttatactagcttgcacaatataatttttttaggattgttccttttatttaaaatttcaaatatattggtataaaattattcataattgttttatatctgtgtgatatgtagcgatgtccattttaacattcctgttgcttttaatctttcaaaaaattgatctagctaggcatttatcaatcttactaagaagtattttcagtgaatcaacctgtggctttgttgaaactctttagtgtttgtttgttttctagttcattatttctattcttttaaaaattgtgtctaaaaattttgggagggtttaatttgctagtcttaaaaactaacttaatacttagctatttgattttcagcctttcttcttttctaatatgtgcatgtaatgttgtacatttctattcaatagggtcttcatctcacaaattctgatatgtcatattttcattagtataatttcaaaatattttctaatttctattgtgatttctactgtgctccgttaagtttttagaaattagttgcttaatttccaaacatatagggattttattacatacttctaacttaagtccactatggccagagtacatactctagattactacaatcctttgaaatttttgaaacttgttctgtaaactggcatatgacaatatttgttaaattcccaagaaaactgggaagaatgaatgggtcttggaaaattttggagtaattgctcaatgcataaaaattgggacaagtttgataattacatttttcaaatcacttatattcttacccatttatttttgcctgtgatctcatttactgcaaaatgtgtgttaaaatttcctagtataattttagatttgtagatattgcatgcaagtcttgtcattttttttgctttatatcgaggctcaactattaggtgtatacagattaagaattggcatatcttcctgttgaattgaaccttttatcattaatcgaaatgtttttatctctaatagttattcttaccttaaagtctgattagagtgacgagaatatagccatgtcacctttttcttggttagtgtttgcatggtatgttcccattcttgtactttttttttttttttttgagacgaagtctcgctctgtcacccaggctggaatgcagtggcgtgatctctgctcactgcaaactccgcctcctgggttcagccattcttctgcctcagcctcccgagtagctggcactacaggcgctcactactacccccagctaattttttttgtattttttagtagagacggggtttcatcatgttagccaggatggtctcgatctcctgacctcgtgatctgcctacctcggcctcccaaagtgctgggattacaggcgtgagccaccgcgcccggccccatttttgtactttcaatattaattgcttaatttctaaatggtattatctgtgtttcttataagtaacacagatttgtatcttttgtttatccagtctgaaagtctttgtcttttaattggaatagttagtccatttgttgcaattattaatatacttgtatctgttttgccatcaaatttttaaatttctgtttatctaactaaagtttctttttaatcctttcttattttatacccctttataacaggatgttagcttactctcatatacactgtttcccatcttccattatgttgataatacttagaccaatagttcaaagttttagtctcagaagctctttatccccttaaaaagtattgggaattccaaaaacgttttgtttatgagagttatatctatgaaaacttatattaaaaagtaaaactaagaaaatttaaaatattcattaattcattgaaaaaaccactacatgagagcataagtaatatatttttatttaaaaataactatattttcccaaacaagaggggcatcattttgcattgcagccaattaaaaaaaattctgctttagagaagacagctggattctcatatttgctattacattcctttttttttataatttcataaattagtctctagaaaactccactacacgctcatgagggagagcaaaaaggcaaataacattttggcattatgaaaatggttttgctctcatggatgacttgaaagggtctcacaaaccacactttaaaaatagctgaccaagactagtgattctcaagctttaatggtatattcaaattatctggaagacttgttaaatcacagattgctgggaccccacctgagtttctgattcagtaggtctggggtggaacctgaggattttcatttctagtaaattcctaagtgatgccaatgcagctggtttaggaactatactttgagaatcactgatctagacttttaattctgggttattacggatgtaatttctctttgtcttggattgtagctactcctttttttttttttttttttttttttccgaaacagagtctcactctgtcacccaggctggagtgcagtggtgcgatcttggctcactgcaacctccgcctcctaggttcaagcaattcttctccctcagcctctcgagtagctgggactacaggcatgcggcaccatacctggctaatttttgtatttatttaagtagagacagggtttcaccatgtcaccatgtctgccaggctggtcccgaactcctgatgtcaagtgatcctcctgcctcagcctcccaaagtactgggattacaggtgtgagccaccgcacccagttagtcaactgtagctatttttaaaattgtgatcaacaatacataacataacatttaatattgtaaccattttaaagtgtacagtatagtgtgttaactttattcatcttgggcagcagctctctagaactttttttatcttgtaaaacggaaaatctatatctatgaaacaacaactctccttttcttcctcccctcaggccctgggaactaccattcaactttctgtttctaagagttcgaatattttagatacctcatataagtggaattttggtgtatttgtctttttgtgactggcttatttcacttagcataatgtcctcaaggttcacttttgtttttgcatgtgacaggatttcattctactttaaggcaaataatatttcattgtttgtatataccacattttcttcatccatttatctgttgatgtatattgtaggtggcttccaactcttggctattgtgattatgctataatgaacatgggtatgcaaaatattctctcaagatcatgttttcagtatttttttttttggatctgtactgaggagtggggttgctggatcatatggcaattctatttttaatttttgaggactctccatactgtttttcaaagtggcttcaccattttatttatgtatttagagacagggtcttactcctgctgcccaggctggagtgcagaggcatgatcatggcttaactgcagcctcgatttcccaggctcaggtgatcctctcaccccagccacttgagtagatgggattaaggcatatgccaccaggcccagctaattttttaatatttttagtagagatggggttttgccatgttgcatgggctagttttgaattcctgtgctcaaatgatccacctgcgtcagcctcccaagtgttgggattacaggcgtgagccaccatgcccagtgaccatttaaattcctaccaataatgcacaaggattccagtttcttgatatcttctccaaaacttgttattttctcttttctgtttgtttgtttggtttgcttatttgtggttaatgacatgggggcaaaagcaactgcatcttggatgctaatctgccatgttgacttctgattaactccagttctgggaaggcctcataaattttcattttatctattgttccttgtgtaagagcatgtacttgttgtaaagcctgctcttaggttaaacaaccttgatgttatcatacttcagttgccctacacatctcttctgaaccatgaataccattttttatggtacataagccctggatcgtaaaagagatggtgccaggatccgccatcttgtctcgctgcctgagacacagacatggcattgtaaatccctattaaatgtttctttctgagaaactggatatgtcagcctctttcttcagcctctcagcttcctcagtcttttggaggtaggtttgcatagacatgttcaccacagaacaaatgaccatcctaacgaatatgaggtgatatagtattgtgctttctattttcatttctccaatgattggtgacgttgaacatcttttcatatgcttgttgttcatttgtttatcttctttcaagccctgtgcttattttttaatcgaatttcttgttgttgctgggttgcaggggttttaaaatatgtttagatattaacctattgcaggttgagcatccctaatccaaaaactcaaaatctgaaatgctccaaaatctgaaactttttgagtattgacatggtgtcacacatggaaaagttcacacctgacctcatgtgactggtgactgtcaaaaaccagtcaaaactttgattcatgcatgattaacaatattgtataaaattacctgccagctatgtgtataaggtgcgtatgaaatgtaaatgaatttcatatatagacttggtttccatccccaagatatgtcattatgtaaatgcaaatattcccaaatctcaaaaaatctgaaattcaaaacatttctggtctcaacatttcaaataagatatactcaatctgcctcagatatatggctataaatatattcttttatttcataggttgccttttcattttgctgattatttccatggctgcacagaagtttttaagtttgatgtagtcttatttgactatttttgcttttgttgtctctacttttggtgtcatatccaagaaaccactgccaaattcaaagtcatgaaggtttttctctgttttcttctagaagttgtataggttcaggtcttatgtttaggtcttcaatacattttgtgttagtatttatatatggtgtaaggcaaggacatacacatggttatacagttttcccaacatcatttgttgaagaaattatcttttctctatcgtgtagccttggcacctttgctgaacatcatttgaccatatatgtgaaggttatttctgagttctcttatctgttctgttggtctatgtgtctgcccttatgccagtaccatgccgttttgattactgtaggtttgtgttttgaagttaggaagtatgaggccttcagctttgtttttattctcaagattatttcttctattcagagtcctttgagattccacaggagttttagaatttttgttttctatttctacaaaaataccattgcaattttgatagagattgcattaaatatgtagattgctttgagtaatatggacatttaaaaatactaagtctttcaatccatgtacagtggatgtctttccatttatttgtgtctttagaatttcttttagcaatgttttgtagttttcagtgtacaagtcttttgcctacttgtttaggtttattcctacgtgtttcatttttgttgatgctattgttaatggggttgtttgcttaatttttttttggattgctcattattagtgtatagaaacacaactgatttttgtgtcctgaaacttttctgaatttgtttattatttaatagttctgacagtcttttgtgaaatctatagggttttctacatatagtatcatgtcatctgtgattatgagaatacagataattttacattttcattatctatttctattctattcatttcttttcttgcctgattttttaaaaaaattgtttttggctaggacttccagtactagtttgactagaagtgttgagagtggacattcttgacttgttcctttttgtaaagggggagttttcagtttttcttctggtcctaatttgttaattgcttttttttttcatcataaaagggtactgcattttgccataaactttttctgcatcaatttgatataattatgtggtttttgtttttcattctattaatgtggttattagattgattctcatatgttgaaccatccttgcattccagcaataaatgccacttgattataagttataatttttaaatatgctgttgaattttctttgttagtattttatcgagggttttacatgaacattaatcaggggtattggtctgtagttttcttgtcttgtagtatttatgtctcattttggtgtcagtgtaactaacactagcctcatagcatgcctcatagaagtgttccctcatctttttgtttttaagagaagaattggtgctaatttttaaaatgtatggcagaattctccaatgaaaccttatgatcctggacttttctttgttgggaggatttggttactgatttatttccttacttgttataagtatgttctgatttttaatcctttattatttagtcttagtagattacatccttctagaaatttatacatttattctaggttatttgttgctgtataattgctcatagtagtcttatgatctttcttatttctatagcattagttgtaatgtcttctcctttttgttattttaatcttttctcttttttcttagttttcctaaagattttccaatattgttgatcttttcaaagaactaattcttattttcactgatttttctaatgtttttctatttcatttatttatgctctaatgtttgctatttttttcccttctttggttttatttttttcttctttttttcattccttgagttaaaaagttaggttgttgatttgagatctttctgcttttttaatataggtgtttaacattataaactttcctcttaggagtacatttgctgcatcccataagttttggtgtaatgtgttttcattgtcacttgtctctagatattttaaaatttccctttgatttgttctttgattattcaagagtgtgttaattttcatatatttatgaattttcctgttttccttttgctattaaattttagttttattccattgtagtcagtaaagatacttggtgtgatttcaattttcttaaatttgttaagactagttttatggctcaaaatgtgatctacttggagaatgttccatgtgttcttgagaagaatgtgtattctgctgctgttggatggaatattctgtatatttctgttaagttcatttggtctataattttgtacaagtcctctatttccttgtcgatcttctgtctggttgatctatcatttattaaaagtggaatattgaattatcctactattattgtgttattgtccatttatcccttcaattctgtcagtgtttgcttcgtatatttgggtactctactgtgagctgtatcttcctagtgaatgtactctttatcattatataatgtcattctttgtctcttgttagacagtttttgactaaagtctattttttatataaatatggccacttctgctttcttttgattaccatttgcatggaataccttttctatcctttctctttaagccaatgtatgtctttatacctaaagtgagtttcttgtagagggtatatagttggatcttttttttttaaacaagaaactattcagtcattctatgtcttataatttgacagtttaatccatttacacttaaagcaattactgataaagaaggacttcctattgccattttattgtttttggtatgtcttggagttttctctccatttttatttcttgctgccttcctttgtgattcattgatttttttgtagtgacatgctttgatttctttctcattttcttttgtgtatattccatagatgttttcttgtggttatcatagagataacataaaacgtcttctggttataaaatatattttaaactgattataacttcaatagaatttaaaactctactccttttcattctctaccacccattaatgctattgatgtcataaattacatattttaatattttatattcattaatatagttttatagctagttatttatatgctttcttttaattctatacctgaattaaaagtgatttatacaccagcattacaatttgtttctgtatttatttatatatttacctttatggagagctttaaatgttcatatacttttgtgctgctggtgttagcattcttttatttcaacttgaaggtctctgtttagcaattcttatatggcaggtgtagtggtgacctccctgaacatttattgatttgggaaggtcttattctttcattttgaaggacagtttccccagatgtagaattctttggtaattttgttttcttttagtgctttgactatatcatgccactccattctgttataaaatgtctctgctgagttatctgctgataaccttatgagagctcactttttaatgacaagttgctttcctcttgttgttttccagattgtctttgtctttgacttttgaaggtgttattatgacgtgtctcccatgggcctctttgggtccatcctagttagagtcctttgaacttcttgaattcggacatccactttcttcctcagatttgggaagttttgggtgattatttcttcaggtaaactctctgctccattctctcttttctcactttttgacttctataattcatatattggtcagcttgatagtgtccaataagtcccttaggctttcttttattttcttcattattttttttttgttccttggactttataattttaaatgaactgttttttagtttcctaattcttttttctgtttgatcaagtctgctattgataccctgtagtaaaattttcaatgtagttattgtattctgcagctccaatatgttttgttcttttttatagtttctatcttattttgatattctcattttgttcatgcactgtttttcggactttgtttagttacttgtgttctcttgtaatgcatcaaacttctttaagaagattatttgaattctttgttggctaattcatagatttccatttcttgagagtcagtctctggagtttttttgtttctttgattgggttatgtttccttgtttgtgtgctttgtaatttttgttgtgattttgcatttgaaaaaaaataaccacctctcccagtctttaaggactggcttcacatagaagaagacattcatcagtcagcctggttggaggttccagaggtctttcaaacctttcttggggatgcattttctctgggtttatttctcaattagataggtttgctggtttttcaggagctgtagtctcttactcactctggtggatgtttatggcactgcaattttctggcacttccacaagccactgagctctctctcttctcaatggcccccaggactttgaaatatgccagttttccatcagtgctttgagccaggtgaaacagaaatcagtttcttaggaagcccccaacaaaagccagaaggttggacacacatttctctccttttttcctcctatgggaaaagccatgatcttggtactttctccctatcttgatgagctatgttggctctgtctgcagtattgcaagttctctggtgctgcttctaagttgttgagctctcttttgttctcagaggctaccaggaatccaaagtatgtaggtttccccatcaatgctctgtgctaggcaagacaaaaaccagtccaggcattcccttcaaaagctgaaatgttgaatgtgcattccactcctctcttttatttcccaaagagaagctatatattggagttttccttttgatcatgatctgtgctagctttggggaaggtctgatgcagttgacatgaaatagcttttcttacctgtttcaggggagatgttattggctttcagtttgcctgggatattgcatcttcctaactggtttccggcattcttataaaggcattttggagcatgtattgttgttgagtcaaggtttttgttggggagtgaggtcttgggcttcgtattccaccatcttgctgatatcactctatagctactttttaaggtaacatcaaaatctaccaaggtattagatggtcgttactttatataaatctgtgccatctcctggaatgttctgtattctaattaaaatacttaatacaaaatttatttcagtatgaatatttttgtgtcactctgaggatttgtatgcctgagaatatgtttagcatcctgtcatacttaaatgacagtttggctgaatatgaacttcttgctctaagtacatttttcccccaatacttaaaaatactactctatttttagaaattctttttttgctgttggttgttactagtgttggtgttgaaacatctgaaattaatccgattctcgatcagtattgcaggatctgctttttattctctaggagcttttgtaactttctccttgcctttgatattcttacattttttaataagatgtctaatgtgggtttttctttattctcctctttggaattatctgactcttttactgtaaagtgtcctcttcttccttcttttcttttatttgggaaaatttatctccattacttcttcaaatgttttcttttcttattattgctttctctttctgggatttctattattctcatattactaattctagttgtattttgctctccctccacttcttagattttcttttatgttttatattttcttgcctttttatccttccttttgagagatttttctcaatccggtttttcacattttgaatctattccttagctaattcatgctatttgtttgattttttctttattttaactaggtttttttatatctattattaattgtaacttttatcatctctttcggttctaatgtttcttctttggcaccatatgtaacccgtaagttgtttttatttaaaatagttgtgcttttcaaatgtatttttattttgctttgtgagatcattttccccaggagatattggctactttgtcgagaagggtagatcttaagctgcagcagccctaattagctcaggttagggagctaagcccttgggcatggtaggtgggggacggggtgggtggtgggagggaggggggaatgtctgctgatatcttaaactcacatgtatttattcttgaagtatatgcttcttttctccccccacggctaatgaaacctgctttccttttggttttcacatctattaataaaacgatgtggctcatttctcatcctcctccaagaagtggccaatttctggtgggttagagaattcccaggggctataagatagaaattgatgctatttaaaaaatgccagagagtcttccactatgcctaaatatggccatgggagaaggccaggtacagaaaaaccaattagttacttctggcccttaggtcaaggcctcattctttgcccagaggaagtagcatcctgagattgtaaaagctaatcagtcttaaagagtttggaaggggatgaatggggattctctgctcaaggttagtctctacctgtttttcttaatgcctcacaaatacatatcttctgcactcctttgtttgtattaccttgcacacctggaccagagctgagagccataaggatgaggacagaaattgtttgtccgaggcagcaacagagaagagcaagaggaaaacaccaagagttcctatcttattgtactctcccaatgtatgccgttattccttctattcaaagtcaaagcctcactcatacaccagtcctaaacagtataactccagctctcttgacaaatttctaggtattttccctcttcagtacttcagaggaaggagtcagccatcatactggttcagcgtcttgaaatatcttgattttaatcttatttctaatttttccaaaagtttgatcttggacagtttactttatttctccttatttttttttctttttctttttttttttttgagatggagtcttgctctgttgcccagactggagtgcagtggcgtgatctcggctcactgcaagctccgcctcccaggttcacgccattttcctgcctcagcctcccgagtagctgggactacaggcgcccgctaccctgcccggctatttttttgtatttttagtagagacggggtttcaccatgttagccaggctggtctcaaactcctgacctcgtgatccgcttgccttggcctcccaaagtgctgggattacaggcgtgagccaccgcgcccggcccttagctttcttagaataaaatgggactaatacctaaccttgatattgatgtaaatattagaaataacatataagtcattagtgctgttattggcatagagtagaaattcaataaaccatagctcctattataattattgcttttgttactgttgttgtaacagaaaattagagctgagcctgcctttctgttcagcaatgggatgttctggataatgggatgcaatgttgctgtgctcttcgtataaaaggtcatctttactgtgtttaggataacatcactgagattgtttatttttcctttggggctatgtataaccactcagaggatttgggggtccgggctccaggaaatgaagatgtacctgacagctgtcttatgaggggaagtaactgacccctataacatgatcaaaagcagaaggaatggtgtgggtgaccattgtggatattgggaatagccatattcagatccagcatttactttccttcttgtctgtttcaattcctttctgttagagcccaatgccttcaataaaggaacattacatactacagagtggctttcttgtgcttgggtaattaagagatataactgtccattttggggatgatgagtcttgagaagtttgatcatgagatagtaagaagagtctacaaaaagctggtccaatctcagatgactgactgagctgacaaacagagtggacctgtggggcagcccaacaggcctcagggattctcagaaatacttggggtggggaacatgataaaagactgcgattcctaaagtagcaagataggagatagaaaattctgatttgacattaagggaaagtatgcctcactgtaggatggaggatcaggacctttgccttgcattttctagttccaaatgatctgtgttaatattagcaccctccagcactctatacctgctcgcaacagaacaaacacttgttgcctcctctcttgcttggagggctcttggggacagagctttgactctgagtcacttgattgtcagcccccctgccctgggtacttggcttccactgtggtcagcaacattgatttctgcagtggacctggcaacattatggtcagctacatccactgtggggcctcagcaacatgtgtcctcaattttctcttctcagggcggatatgaagtgggaagccaagaaaatatgtctgcttatttcttaaacttatgcatatttattcttgaaatgtatgcttctttttccctcagggctaatgaaacctattttccctttggttttcacatctaaaattatgtggctcatttctcatcctcctccaagaagtggccaattgctgatgggtcagagaattcccagagtgcataagatagaaactgatgctattttcaaaatgccaaaaagtcttccactatgtctaaatatggccgcaggagacatgtgttctttaattatgttctcccaagttcaataattacttaggaagcttcttggagtgaaggatatctgagaaattcataggggctttcgttgcctcccaagtcacttctataaactccactctacagacctcataaattccaacagggctggacaaaagcaagccccccttttctgggacagcccctgtttccttctactctaagcagtgactctcacagcctttgttatggactcctcagatctctgtacatagcaaccagggcatgaggtgagctggtctcttcccattaaacatgatgccatcaagctgttcctgtcagttactgccactaaaattacagctgttggtcaccccttagtggaaagaggcaatctcctccctcctcttccttcgtcagttactaccactaaaattacagctgttggtcagcacttagtagaaagaggcaacctcctccttcctcctgcttcttaaaaataacatgcctttcactcaatccctactagaaaatgcacataccaacccagagaaagttaagccaagaaccccagcaggctgagttttgaacctgaggacacacttgccaggctctcagggactcagcttgagcctccatgcttcccaccctcccactacagctgtctcacagtttgggctctgagataagaggtgtttcatccgtcaaagaagaaaagtccatcaggaaaaaaaaaacccacaacaatcccataagtcatggaggaaagagagagacaggtgtgtgtgtgtgtgtgtgtgtgcgcgtgcatgtgtgtgtgcccccatgcatgctcatgtgtgcacacacatggggttcttatatgtacatttaatgggcatacatgaatttttgtgtgcatgtgtcatgcaggtagtgtgttgacaatcagaacttaactcctttttcttttcttttttctttttttttttctgagatggagtcttgttctgtcaccaggctggagtgcagtggcgtgatctcggctcactgcagcctctgactccctggttcaagcaattctcctgcctctgcctcccgagtagctaggattacatgtgcctgccaccacgcccagctaattttttgtatttttagtggagacaaggtttcactatgttggccaggatggtctcaatctcctgaccttgtgaaccgcctgcctcggcctcccaaagtgatgggattacaggtgtgagccaccacgcctggtcctttactccattttcctctaattttcctatccacagcctccttttccttaccctaaggtaaccttttaaaatttatttgcttcactttatctatctttatgtgtatgtgtgcagcaagaaactgaacagaattttggcaaagagggttgtttgtagatgtgaatatttcctcttggcttggtggaggtctttttcctggaagccacttcctggggcttacgtgggggagaggacacagtcttctgttgaatttacaaacactgcttccctggccacctgcccacccttgatgagaaggttgtgtgctctgtatgaggaagaatgacttgaggcagcctgttaatcctacctaagtaaacagaatagtaagtgggaaatgacagtggcttttgactatctttttaaataaactaaacccaagtgcctatttatttcaaagcttcctccatttaacaatgtcttagaaacatctctcagatttcatctcatgattcttctttaatgactcactgatacaatcatattaacccaagttccaatctccttctatctggaagcattacatgagattttagagtcatacggactcaaatattgaattggattactagccatgtaatctgtaatgagataattatttctcagttgcctcatatggaaaaaggagataataggaagataatagtgataactacctaatagggttattttacagattaaatgaaaccaatcttgtaaagcttttaatagagatacttttcatatagtaaatctctttaactatttttatcttttctctctgctcctagctattatctgtgccaattatgtcaatcttctctctcctgctttcctactgtattggcttctcagggctgccataagaaaatatcaccaattgggtggcttaaagcaacagaatttttccctcactgttttggaggctagacatttgacatcaaagtgtcatcagggccctgctccttctgaagtttctagggaagaattcatccttacctcctccagcttctggggcttccggcagttcttggcttgtggcagcataatcccaagctttatctgtctccacatggccttctctcttgtcgctgtggcctctcctcttcctgtaaagaccccagttattggatttacagtgcattctaaatctggtatggggctgggcatggtggctcatgcctgtaatcccagcactttgggagggcaaggcgggaggatcacttgaggtcaggagttggagaccagcctggccaacatggtgaaaacccatctctactaaaaatacaaaaaagaaaaaaattagccaagcatggtggtgagcacctgtaatcccagctacctgggaggctgggtcatgagaatggcttgaacccgggaggtggagattgtagtgagccaagatcatgccactgcattccagcctaggtggcagggtgagactccatctcaacaaaaacaaacaagcaaacaaacaaataaaaaaaagaaataaatccaatatgatattatcttgtgatccttcacttgcaaaggtcctatttccacatagggtcacattctgagtttctgcgtagacatgaattttttgcgggatgttggggggactatgctcacttttcttcatcctcactgccatgacttagagcaatattcacctgtgtgactctactaccctgtgaactgatctgacatttctctggtctcactcatatccattctccacattgcttccagagaggtcttttaaaagtacagacatatctaatcaagggtacctttttctcaaaaacctctaaaagctcctggttgtctttagggtaaaattaaacatcttagcattcaaggctcttcacaagttggtcccaaactgcttttctaacctaatatcccactatattctgcactactttccatcacctattccagcccactcttaactaggtccaagggagaagttcactattgctacagccatgatgggcttgttctggggtaagatcttggagaccaggcccagttgagtggaaggtttcttgacagtgccttgagacaggcgttaactcaggcgtgggtgtaaaggtggaatttggaggccagttctagagaacatgggtcaaacaccaggcctgagggataaatttagttccataaacacagatgaaagtgttagagccaagacgaagaacaggcttaggaggggaagacaagttggtgatacacttgagactctagtccttgaactgaatgagtatgatgaatccattcacatattggaggttgtccaagtggcctgggctgggctggcttcttagcactggggcagaataaaaagtgcattctacggtcagtttccacaggtccctgtggtcagcagggagggacacatggaccacagaggccagtgacctaatccttgtgactctctgttctcttctgtgtttattctgtgggacttaaagcatagacaactccaggtcataactggtatttgtagctgtttgctgttgtggtttcctaagcagctgggcagatggaaggactgagccttcactctttttgaggatgtcagatccggcctgtcttaacttttgctctatgcatcttctggttcctgagtcagtttggacccaggctgagcattaatcagcaggccaacctccaccaactgagggagcttgacttggtggcctctaaggaattctagctctgatactttaaaattgaatccagcaaattagctgaaggaggcttcattctctctttcacatttggctgatttgctcaatgcatgacttgctgggtagctgacatcctgtgatcctcagacacaggctgcagttaagaaagcaatgagggacttaagctgctttagaagtgatttagaaggctcacaaggtaaaaccacctctcagacttatgttagaattttttttttttttttttttttttttggagacagagtcttgctctgttgccaggctgcagtgcagtggtgtgatcttggctcactgcaacctccgacacctgggttcaagcgattctcctgcctcagcctcccgagtagctgggactacaggcatgcaccaccacgcccagctaatttttttattgtttttagtagagatggggtttcatcattttggctctcctgaccttgtgatccgcctgcctcagcctcccaaagtgccgttattacaggtgtgagccaccatgcccggccacttatgttaaaatttttaataaaagtttctttctttcttccttcccttttcctttctttcttttcttttttctttctttctttctttctctttctttctttctttctttctttctttctttctttctttctttcttctttctttctttctttcttttctttctctctctttctgtctctccttcctcgttcctccttcctcctttccttcctctttcctcccttcttccctccctccctccctcctgccctttccctccctccctcatacagtactgtattgtgataatggacataatttatggatgagatttgcattcccaacagtcttcggatcttgatgcttctgcactatctggaattttttatttttgaaatgggtcctggggaccagatgttttgagtatgtttaaatctggcttgaaggtggggggcagaaaaaacacaaaaaatatctggcccctttagctttttaaatggcacagttgactgaggaagcatagtgtatgagcaaaactcctaagagctcctgacgctggtcatttgttgaagggaggctattttagctgcacctcaatgctacttttttttttcttctaacagccttctagttttgactggctttgccggagtagttctatatttcactgacataatcattttagacaaatgtgctgagtaggtttgtgcttgtaaattacgtgtgtttacaagaatattcctcaggaatgcattggtacaacatttctggaggatattttaaccacccatattaagagacttaatgatattcataatctttgacccagtcattctgcttttaggaatttctccttcaaaaacagtaagaaagtgtacacaagttattcatcagttttacttatgaatgtaaaaatctggaagtagtgaaaatttccagcaaaagatattgattaaataaattacatatgtcttgcaatggaatgctctatgaccattaaatgatataaataaatatttaataatatatgagaatgctcatgcacactgtctaatgacatgtatattaaagaaacatattcatggtaacagtggcaacctctaaatcaagcttgtctaacctgcggcctctgggccacatgtggcccaggacagttttgaatgcagcccaacacaaatttgtaaactttcttaaaacattattagtttttttgtcttttttttttttttagcttatttgttattgctagtgttagtgtattttatgtgtgccatgacaattcttctcccagtgtggcccagggaagccaaaagattggacacccctgctaaatggtggcaatgtgggtgcaattttcattctttataccttagcatattttattacacatgcaatttcctttaattagcaataatccctcttatgataataaagaaaattatatatgtgcaatgaaaacaataatccacattattaagcattaactttaatactaaaatatattttaaagatatctttttttatataagatgccctgagcaaggtagaaatgatcctaagtatgttggagtaatatattttcaacagggagatgagtttaatgttttaaaaaatatttttgttttcttatggaaatcctttttgattccattcacaatgtagaggctccatctatctctacctgctagatctcagtatcctttcgttacagcaaatgtttgttgagaatctgctttatgttcagtattatatgaggcatgatgtagatacaaaacataagctctgtcctccagaaatttataatctagtggaagaggtcagtattatatatttaagaaaagactagtctttgttatggttcggctctcaaatttcagtggctgctcataacggtttacttcatgttcatgtgaaggtcctggtcagttggcacttcttccacaggctgtgattaagaggttctggctccttccaacttgcgtttctgccataagaccttgaattttctgctgaaacctctgcatccagcctgcagacaagggaagggaaagggtggaaacttgcacaggaattttccgtcagccagtccaagaggagcatttttcacctccccccgtatttcattgattaaaattcagccatgtggctccatttacgcgagggagtggggcagcctggggaagatgtttctcagcaacagtgctaccctgctggacagctggtgatttttaccataaaacaagatagtaataaggatagaatgaggtaaaaagctttataattacttccttatatttttgttttctgatttttatctaattgttgtaatgaaatcagtgagatccatgattcaagctattaaatccattgtgcctttcaccaacccaccactcagtggatagtttttgtggtgtctactctctgccagagcctgggtaagcaggaaagactgagggaaagatgcttgcccttatagatctaggggtgtccttatgcatataccaatcgtgaagaagtggagccgtgtctggtattttacagtggcttcaagttagacagacttcaattcaaattcaaatcttggccatgacagaggccctctgtgaccttgagaaggttatttaaccattttgaaatgcgattttctcatctacaaagtgagtcttatcccacagtgttgtctttataagaattaaataataaataatgtgtgaagcacaaatgtcctgggtcttagaaactcaaggacacaagaaaataaggtctcatatattataaaaaataatttcttaaaatcaaaaaaattcatgatcatgattaacatttaaatagttgagaagggcataaagtaaaaggtaaaagtgctattaccctttgctttaagtcctaaccctcagaggtaatcatatttaccccttcttgcctaactttcagagattttctacgtgtaggcaagcatctgcacatatatatctatgctttaaaaaaattccgaatggagttatgctaaacagggttttgtatctttcttgctttgttacatcagagaccttggacattttcccatatcatcatatatgaacctatcttacttttttaatagctgaataatgcctcacagtatgtgtatatgtcacagtctaagtgttccctattgatagatatttggcttatttcctgacttttcctatggctacaatgctgttacaaatccctgtgaacatttatgtttatatacattagagagcagttctgtgggatagatttctagaaatgtagtaactgagacaaaggttacatgcactttatattttgacagatactacccaattactttccaattgaattgtaccgatttttattttcaccaaccaatttatgagcatgcttttccttccccacatttgtcactaaatcacttttgagatggaaatggaattccactattgctcaatatgcatttcgttaatgaccagtcatgttgagcatcttttcatgtttatcactattttaatttttcttttttcctcagatctatgtcctttgccatcatttatataggattgtttctctctttttaataaataatgtttaggggatcttattataaggctattatttgggtgtcaattgtaaatattttccaatttgttattttcaatctttgttcatggtatttttgctatttgaagtatttttattgctatatttattgttcttttatatttttggtctctgggttttgtaccatcatcaggagggactttcaccctagaagattaatttgaaaaagtacttttgtttcatttcttatgttcagggtattttaaaaaacgtttgaatctttgatatgcctggaatttatttttgaataatggttatggtggtaggcatctagctttattattttttctaaataggtagttatactaatattatataatgaataccttacttgttccctactcatacatattactcactgcatatccccatgtattttggtatgcttttgaggtctctgtgatatctgtctttttcagtaccaacagcaaatagtgtaaattaatgaagctttataatttttaaaataacatctcactagtgctccttcaatatttttctttgtcagaatctccctgattttcccacatttctgatgccatgatataagtcacttatgtgatgtgattttattcattgcatttacaaattactttagggaaattcatttcttttgaacatgagaccttccagttaaggaataatcaagtgtattatgttccttagataaactttaatgttttaaagtcaagttccttcacatttcttaagtaaatattcctgagtattttaatctttcattttccttttgtaaattagattaaaaattttgttacatttttctaacctttttttggttaaattgttatcaaccattgactcagttctcttatttatttatttttggctttaacttaatttattatatgttatactttttttaattgacacatgataattgtacatatttatggggtacacagttatatttcagtacatatatacattgtgtaataatcgaatcagggtaattaacatatccattacctcaaacacttgtcattgctttgtggtgagaacatttaaaatcctctcctctagctattttgaagtaaacaatacatcgttgttgactacagtcacctgctgtgcaacagaactccagaacttaaatcaatctcttatttttaaaaaatatttttaaaatggcctttcttaagctttccaagtataaatcacactatctgtaaataatgatcatttttccttctccatttttttaaacttctaagttattttttatgtcacactgcattggaaagtattttcagaaagatgttacataaaggtggtgataatggcccttccaactctgttttttcctttgatgggaattttattataacagtttactattaaacaggtagcatagtttgagatactaatttttttcatattaaagaaaaattcctcataactttcagtatctattaaaatgagtgtacgctttttggccctttcacctattaatgtgggtgacttgtaagaacatatttcttaacattgaactattcttagatttctaaacaagtctcagatggtcctgatatattgttacacagtgcactgctatagtgtctttgtaagacttattttataatttttgcattgatacgcactagattgggtcttaagtgctatctttgatatttttgttattattatgatgactgtaaaataataacttggaaacttcttactgtgtattccagcaagatttaaaaaaccagactctctttgacagcttgcacaattggtctgtttatttttttcttccttgagtcaagtttggcagtttctgttttccatgaaaagagttcatttcttccaggttttaaaatctgctgcttagacctttgcagctatttcatataattattttcatttcctctttctccatggttgtttttctattattattccttctcacttttttctcttgattaatttaggtaataataataggtggtttacctattattgtttattttagctactgttttctttcaaagaatcacattgtatatgtaccagttctactctttctattttataattaattaatttctgcctttgcttttattgattcctatatatccctttgcttaagcttttttcagttattcattttctgcttctttgtgtcaaatgcttaattaattaatatatttattaatatttttagtcattaattttgttctaaatacagctttatatgtctttgagatttttataaatatttgcatttttaaaatatataaaagttatgccttcatgttatctatatggtcaaatagttatataaggctttattaatgacacaagaattcctactcctggcacatggttggaagcagatatggaaaaaggcaataaaattaactttaacacttatactgtgtcttgtatgtataccttactttgacgtatgccatggaattgcctcagggaagaccaggggattctcagtggatccttttaggtggaaagcccccattcctgcctcaaccatgataatttctctaatttcttttgtatatagtatttcatttgaaaattttataggaagaaaagtcttaacagcttataatgtttaaaacttattaaacttacatacatggaccgtgttaaactgtccttatgtaaactgtccttataatgttaaacttattaaacttacatacatggacagaaatccagtggtaaaaacccaatacattattttgactccaggaagcccttgataacaagagacatcattatgcaatgtggcactaagaaataaaatggttcattaaaatatgatatgccatagattttaagaggcataccaatatcagagatgttaaaatgtgaaaaatagttgcatcttaatgtggaataaatatggcatacacttgttaggtatcaattagaattaaagtcctagatttgcttgataattttttgactctgttcaaagggtaaggtgaccaatgaaatactaacgaaagaggaactccagtagaagattatttgctaactaaacatctgagttcagcttaaaaagtgatatttcaaacttttcttctcaatgttctcattctggatggtccagacaccaccggctttgctccatccctttgggaagacagcacacccagagctcaagtctgctgctcattctggaaggggagatgtcctgggcccagggtttggaaatgtcttcttggacaagcttaagccggtaagctcccagatgagctcctgctgttttgttcttccaccccgggccatgagtgtcccagcgggagccccttctgcagcagtaggtcccacagtttggagggcaatggcgtcatcaactcatcctcactcttggcatcctctgctgctttcttgacagtcctccagagcatctcaaaacttctctgcacagtggttctgatggcctcagagcaggagtgtatagaaactagcagtctggaagtccatcccagagcagccaaccctagatctgaaaaatgttttatgtctcccttcatcctaaacatttatacaaattatgtatttaattttgtggtttttgagcacagacataatattttctccaaaatttttaagcaaaacatcccaggaagatgtgccctaggtacatcctgttgttttgtgtaacccaaacactattgaactaagagaatacttaagctccagttgcagaaacacggaaaaaggacccaggagaaactgggttcaatcccaactgagtcacttaggaattatgcgatctgggaaagttacttaaattctctaaatttcagtttcttcatttgtaaaaaggggattaaaaacactaaactcacatgattattgcaaaaacaaaatagtatatttagaccatcacagtcctgggggtgtgctgagtgcccaacaacagttactttcccctcactctgtgtcctccctttcttaagaaatttttcccccctgccaggctcaggcctagaggcagaggaccagatgggatgtgggtaccatctagtctcccccacctctgccaaatctgtacctcaaagcaccctaaaaggatagctgtctcaccttgtcttaaaaatctccaaacaagcaaattgccactatttggtaaataatttcacctcaccagatttgtcctttcatgtatttgcctattcacaagaaacatacattggacttatactgtgccaggactaggcaaggtctcgaaatgtaaaaagatgtttgacataatccccttccttaaaatgctcataaataggaaaaatctggaaaaaaacaatctcagtgccatggaattcatgctatgataaaaagatacccacagtctattccagattacacagcatgggcatcttctagaatttgggaggagatggatgacacagagggagtattagaaaggcttccatggcagcagacacctgacctgaaacctgacatgcaaaggtgaaaaggggttttgaaatttcatttcaggcaaaaactcagaggtagagagcatgatttgggaaagtgaaagttgttaaacaaaactcagcatagatatcatgaggaatgctgaagggactgaggtggtggacaatagacatatcgtccggctttagccctgtgaaagtgaaagaaagaaagaaatccaaagacagagaaaaaagcagtttctgttgtaatccaggtagactatgttgaaagtctaagctaatggctggggcaaagtgagaaaagccaggtttaagagaccaggtgtggtggctcacgcctgtaatcccagcactttgggaggccaaagcaggcagatcatctgagatcaggagttcaagacccgcctgaccaacatggagaaaccccgtctctacgaaaaatacaaaacaaacaaacaaacaaaaaattagccaggtgtggtggcgcatgcctataatcccagctactcaggaggctgaggcaggagaatcgtttgaacccaggaggcggaggttgcggtgagctgagatcacaccattgcactccagcctgggcaacaagagtgaaactccatctcaagaaaaaaaaaaaaaaaagaaaggaaaaaaaaaagacttgaaggagatacaaccttcaaaataacaatgtacacttaccgggctacgtagaatctgtcactgtagttcttaatttctacttcctatgcagtattagggatgttgttaaaaaaagaggcaataggaacattggttgagaaatttgatattttaaatctgataaaaataacaacaataacattattttttagcatataaagaatacactatctgttgccaagttaagtggtaaaaatggtatttctaatcattttattttttcagctgttcattcattctatgaagtcaatatgatattttcaggttgatgggagaaatgtgtataataatgtgagctaaagtacattagaaactatagcgtgccattatatacatttgctcatttgatttctcccaatggccttttgaaaagtccatttatgctcactttacatgcaagataactgaggcacagatttgcttgaacagtagctaagccaggaatgagtcttatattggttcagtttcaatgccacactgcctctctggattatgccgatattgagatcgagattccttcttactttgggaagctgttggggattctgggttatagcaggaagctgcaggaggagacgagaatatgtcttgcttcatgttaactctttctctctgaccccctctagacaaatcatttggcctgctattggaggggtgggggtttatttagcttccctggatgtttctttagggatgttaaaaggaaccagccaatactaatctcaaacaggatatcctttagggaaaacactccacactaaatacaaacaagagatttcaaactgaagaattgcagatactgaataatccctttgatttagttcttggggtttgtgtgtgtgtgtgtgtgtgtgtgtgtacatgtgcacatgcgtgcatgtgtgtatgtgtgtagttttagagtatctcttggacttacagtggaccacccagtaaggatatgtgtgaatccttctgctgccctgcatagatcttggtgaatgtatctccagggttctttctccttctacatatggttttttgtgtgtgcacatgtttttttccattgacttctttatgtgctgatgtctctctttgtcttttttctttttttcttttttgccaaggaccttgcttctggagtaggcaagtctgttaggacatttagaaacaaaaaggatcagtgagctcattccccctaagttcagccaggaccaccaatggtgaatcatgtggatcaggactaaacttccactgggaacaaatcatcagcagactttgctgtcttctggctttagtgtttggtctttgccatctcttggccatgaaagtaggaacctacttctaagagtcttcttgctgaagtttggtcagtgtcccagtaagaagagggagtgacacttcactcccataagactctgctgcatttatgtttgaaaatccctttcctgctttccaagtgttcttctgaataccccattgttatagtcatactcaccaccctttctagggatttaatggctaaatcagatcttttttcatggcacgtctcaaggcggaccccaacccttatctcagcagctgatctttcccactgaaaacctggtgccagtgtgtcccagaaccctctcagcctctgagagagtacttcagagtaaacaaagtgaaataccaagaggatatttacagccactgaccaaactcccaatttccttggctggctctggagacaatgcagtcctgcatcagccctcaactgtactgtcagaaattgatacgggaccgagattgagaaaatattatgttaagccattcaataggcaaacaaaacatggtcttccatttctttagaggatctggggctaaatgtttgtttgttttcacaatgatatcatcagtcatcgcaaattctgagcctctcctacctaaacttcctgatctatttcccagggactcttgagaaccaggctttggagctgggagagcccattggcacctaataccttgtgctcctcatggcaagggagatagctcttctcagcaagctcttgtctaccaagctccactgtgcaaactcataaaactcaattctcagtggaagcatctcatatatattaatatataggtattagtctgttctcatgctactagtaaagacatacccaagactgcataatttataaagaaaaagaggtttaatggactcagtttcacatggctggggaggcctcacaatcatggtggaaggcgaaagaggaacaaaggcatgtcttacctggcagcaggtaagagattgtgtgcagggagctgccctttataaaaccatcagatgtcatgagacttattcaccattatgaaaatagcacgagaaagaccctcccccatgattcaattacctcccactaggttcctcctatacatgggaattgtgggagctacgattcaagatgagatttgggtggggacacagccaaaccattatctatctatctatctatctatctatctatctatctatctatctatctgtctagatgctcttcatgccaaatgcctcaagacaagtccctctctgggctaatattatcagtcaactgatgctgacaaattgaaatctctagattttgtttttcagacctggagggaaaggcaatcaactacagggtatgcttaaattagttccttctgctttctaagcaaattctttctcaagaatctaaccatgtattaagaatgcaagatagtgttttagcatctgtaatgtgtagcaggattccattagatgcttgcacttgacctttatagttatgttcactttttcccaacctcacacccaggtgttcatatatcctcatttctttggttttgtttgttgaaactagaatgcctttctctttgccttgcaaaaaggcttatcatctcttcaggcttgacttaaagaacccttcttcaatccatcccttaggaggtgttgtacataatcttcagcctccttacctctatgttttccatatcttttccacaatttgctctttctaccatcacctttatgatatccagtgctctctcctagagcaggaaccagggtcaggcaagtgaggtgcctagggtacaagacgtaaggaagtgctcactttcagggttgtgcacttcaggtctgagccctgggcatctcactctccttgtcctcatcctgacctgctgtcccagaaaaatcctcttgagaacgactgttatgactcatatcgatctaagtataactgcactgctttacaagcaaatcctatgtgtagactgctttctcttgatttttcattttaagatgttagctaatgatctcttacctgggcacaagacagttcagctctcttagaactgtcccctacaccaggcacacatgcttttctccctacattcttacaacgtgatcacatcccaatttcacaattttgggttaaacagtctatgtttacattatcacgaacacttaagcattattatagctaagtctgtagaatatagtgtttgcatttccttcctctataactttttgcttttcttagaattaaagatttctttaacgttttgtgtttgcttcatttttcaattacctaccataactgaagcataaatcattgtcagaactgcaaaagtcctttcaataaggcttaaacaccaggaaacctactgattccatctcctctcaccttgctcccccagcccctgagtcccctactctgcacactagagtgccggatctctgggcttgctactcagcaggcacagtgagtttgcccttcatctttctcctgggaattgcttcccatctctggtgcctcatctttgtgtcctcaatctcaggattttgtcattcttgatttattctgtctttggacagaacacatctttgagaccttgcatgtacaaccatgtctttattctctcctcatacttgatcgataatttgggaatagaattctgggttcagattactttctccaatagctttgaagcattgcttcatggtcttttggctcccagcactactacgcaaaagtttggttcctaatacttgtatgttgcttttcccttctctttggaaacttttaggatcttctctttagcctagtttctgaaattttaggatgatgtatcttgggctactgttgggcactcagtattttgtttttcttttggtttaaatctggacatttagttctgggaatttctcttgtatttgtattttgaaagtttccttccttctattgttttctttttccccccatttctctttctaaaattcttatcagtcgaatgttgactcttgttccagttatctattgatataaaccatctcaaagctaagtagcttaaaacagtagcagtcgtttatttggctcacaagtctgcaattcagagactcctcagttggcgtagctttttctctgctttatgtggcatcactgggttatctccattgggaaaagaatatctgcttccaagatgggtcagtcacagggctggcagggtggtggtggctcttgattgggggctttggtactttccacatgagactccatggcgctgcttgaactttctcagagatgatgtctgggttctagatattacaggaggcctggatagaaattgcagggcttcctatgacctggccttggaagtcccacagtatcatgtctaccaaattctattggtcaagcaaatcactaagaccagctcaatttcaagggcaggggattagactctacctctcaatgagaggaatagcaaaaaatttgtagccatctttaatctaccatagcactcattcctctaatttttatatatttctcccatatttttccatttctgatttttccttagatttttagattttctcaactttattttccaaccattcaattgacttttaacagcaacaaaaaagttaaccatattggtgtatttccatgaactcgtccctgaactcatcagttcttgctctatagacacaatattttttcatattatctgaggatggaggttgcagtttgttagttttggttttcttctgctccatgcaaattctccctttttcctattatttttctgtcaatttgtcttttatgttagagactcttctcaaacttttggcattctttggcttagatgctgacaaggaactctgggtgcaaaggacaagtatgttgactcttaggcatcatgatagggtgatcaggtctgggccagctttttcatcagatgaaatgttagtatctgtaggtgcttttctgggatcagcccagagagaagaaatatctacatcctgtctagggagtatcttaagactgcctgacagagacagtctgggagctacagagtcaaaaagagctaagagtcttaccaagcaaaatgcagacattcatttttatagtcctgtttttggtatgacacttcaccctgctcccatctgcacctgacatccgcagttcgtagctactgtggttcactgctccagagatccagcctccaatttttagtctggcttggggaggaactcccctggttgcttaggagtaaggagagggtgaggggaatcaactgccctatatacagactgtcaacccatcctgttttcagtcttatggctcaattctgctctcagaggtatctagtatctcaaattccagagcctttctagactccaaatcagcttagcttattttgattttctcttagcagtcttcggtttcactttcttctttagtaaatctgtaaccacacaattatcctttttaatcttcaaaaatgttgttaacattaaaaaaatttattgtccttttttctattctctttgtctttatgagttttcaccttttcccccattaccatcattttattaaggttttgaaagggcagggaagtaaatatgtgttgagtttgacatgtttaaccagaaatctgcctgtatattttcccctggtgaggaacagttgagtgtttcttttgagataaaaacaatctccttctagatgaccctgaggagatccaaggagtgggctgaagagtccctcctttttgacctgcaggataaaagtgtacttagtactactctagaaagtgtgtaagcagctagcagccctggctgctgtggggccccacagattcacttctcacacagagacaggcagagtcacatacagcctaagtcctctgggtgcctccaattcagggaccaaacaaaaaccacagccaacatgttttggatgtgtaagtcactaggctaagcaattacatgtgatgtgtctcatttaattctcataacaaccttatgaggaatgtattattattattaaactgtacctctattttagagataaaagcatctgagccacagaaaattcttagcacctttccaagaccacaagtcttggaaagtacgtggcagagcaacccaggaggtctacttttcagactactctgttgttactccactttgcctcttacttgttcatcacttgtgtgaagtgggaatccagttacctctcttgtctggggaccatcacatgtgggccagagatttttgtccctggcctgggtgttgaagccaggagagacccatcaacctttcaaatatgaaactaagatatatgggaaaatgttatcttgggccactgtcagttgggtgaggaagatgaagattggagcatggaggatgggagagaatcagaaatgtatcccaataaatgtataaactgtatgtatgggctgggcgtagtggctcacgcctgtaatcccagcactttgggaggctgaggtgggcagatcacttgagctcaggagttcgagactagcctgggcaacatggtgaaaccacatctctatgattttttattttaaattagccaggtgtggtggtgcatgcctgtagtcccagctacttgggaggctgaggtgggaggatggcttgagcctgggaggaagaggttgtagtgagcagagatcacaccactgtactccagcctggccaacagagccagatcatgtctcaaaaaacaaacaaagcaaaactgtaggtatgaattaggttttaatgtataaatgtcttttatgtgccaggcattatgattggcacatgcagacttattatttggcttaaggtttaaaacagccttaagacaaaggtaaacgtgagacttccttacttttcagataaagtagcacataatcagattggtgaagatgtctactcaaggtcacatgggtaaaaaaccacagaactggaactccaacccagacctctggacctaactcaagcctagttccctttttaagggaagatttgattgttctcagttaaaaaaaaaaatctactatggaaatcctttatcacatggttcggtatgtatcaggccttagaatgggctaagaggtaaaaatgatctggcttttattaaaagtggacattatctatagatctcgagcaaatgactttacttcaggtttcccacctgctagatggaggtaataacatctttcacgtagacataacaaacataaaatagggattatgccacacaaggacttccagtatctgcttagggtctaactgctgaggagtcagggcagtgggactagggggttctgagatattacaggatttccggaactgaggcaaaggaagaaagttaagaaggctcttggctgtgcctggtgagaggagagactagatggctcctactgtgagggtgaagaaggctttcgcaggacagagtccagtcacagtggagcagcatggtgtagtgcaccttctcaatctttagtgtgcacacggatctctcaggggtggtggtaaaaagcaaattctgattttcagggtcaggagtgggacctaagattctgcctttcttataagcttcccgggattgcagcctgctggtcctgggaccaaaatctgagttgcagagttgaggaaaagtcagaagatgtgggcctgactaattgtggcatctgtggcaagccacttacagtcgttctacggcctggttgattctcagattctttatctttaaaatgagggaatatagcaccgaagcagagatatttattttttgagatagggcctttctctgttgcccacgctagagtgtagtggcatgactgtggctcactgcatcctcgaccacctgggcctgagatcctccttcctcagcctcctgcatagctaggactacagggcgtgccaccaggtccagctaatttttaggtttttttttgtagaaatggggtctccctatgttgcccaggttagtctcaaatcctgggctcgcatgattctcctgcctccttggcttcccaaaatgctgggattacagtgtgaaccattacacctaaccagagatatttagatgtgtactttgctttgaatgtttgtaaaagtgtttgggaaattttaaggcactgatatggtttggcttcgtgtccccacccaaatctcatcttgaattttaatcgccacatgatgagggagtaacctggtgggaggtgattggatcatggaggcggtttcccccatgctgttctcatgttagtgagtgagttctcatgagatctgatggttttataagtgtttggcagtttctcctttgctgtctctccctctcgcctgccaccatgtaagacatgccttgcttcccctttgccttccaccatgattgtaagtttcctgaagcttccccagccatgtagaactgtgagtcagttaaacctcttttctttataaattacccagtctcaggcagtcctttatagcagtgtgagaactgactaatacaggcaccatttaaatttaagaggctatttctattgtgtctgtttaataagcaatttattctgaatccagcaaactcaatatgtggcttataacagagtttggatttctaaagttttaaggaaacatgttaatgggttaattttgttttctttaaaccaaaagcactccctatctcttccatttaagacatttatgaaattacagtggtctttgaggatttgcttcttcttactttaaaattcttctgacttgacataatggaagttatttgatcaatcagaaattcctggaattggcaaagcctgtatccatttccaggagaactcaaatggcttcaatttatggtgacttgaaaatggagatgaagaaaagggctatgagtagaatttaagaaaaacttatgacgtaggaaatgaataaataaaactaaagaaaattacacctatcataacaaagagatagtgatttttaagaaggcctttgtaaattttaaagcactataaaatgtctaatatttgactatcaagataataaaattcagaaaaatctctggggtcagaactcaatacataatttatactgatcagattcaattagcataatgctttctgctctgaactttcagctaatttaatgattgtaatagtaacaataataatgattgtcattgctaaaagagatgctatatgtaattagaaagagataaattgaaggaaagactgataagcaaaaaagggcagaagtcgctggcttttaaaattaccagcccttcaaatggaaatcaatgctaaaatcaaggtatggtttcaagatcaaatctagggcacttccaggaaaacatcatctaaatatgaagcggagcctggaattatgaaattctttaagatctcaaaaaaattcaaggacactttcatcaaacaatagtgcttctaaggctgttgcccctcaggaacttcatcagagccaaaggtagagaagggcagatctcgaagacatttgtgagtatggcttttgtctaatggagtaaagcctaataaaatttatagaagactcacaacattgttaagataataacattgtcagaaacactgtttgcttagagtgaaaggggaatagataatatggaatgaaaaaaaatcagctgaaccccaaaacttctataagcagcaaatagcctgagaatactagtgaattgcaaatttgagctctttttcaaggaaaaagaaggccagaaatcaagagcccaaaagctcttgataatactccaagaaccatggattagacctagagcctaatcaaggaactgctaacatgtattctaatcgattttagaattgctatgtatggatactcctgtaagcctccttccccccaccttttttgaatgggaaagtctattacgatcatcctatatcatcccactattgtgtgttgggggtggaaaaacttgtctctatagttcacagatttatagatcaaagggacctgtacttgagtgagcagctgatcttctgggaccatacccaagggagcctcatttgcactgggacacaatttagatgacaaaatcttagacctgggtgctgtaatgggatgaaaatgttagatgccctggaagggagtctgtgtattttgcatgtgggatgaatataagcaattcgtggtctgatgggagactgagggaagagggtctaaaatgggtacacaagttctccgacatgccgcacttcaaaaggtgcgtcttaggtcttctcccttcgaatttaggatggaacttggtgactcacttccaatgagtagaatgtagcagatgtgaggctctgactctggaaaggtcattaaaataacagatgacatctggcactctctcttttgagttctgctctgccttattgtgaagatattcaagcagcatttaaaaaaatttaaataaaaaaaaattttttgggatggggtctggctatgttccccaggctggccgtgagctcctgggctcaagcgatcctcccaccttgatctcccaaagtgctggattacaggagtgagccaccactcccgacctcaagcagccttttgtagagccttttttgtggagagacttaagcctcccaccaacaaccagcactgatttgcctgcctggtgagtaagccaccttgaaagtaaatctttcaatctcagttgagacttctaatgactaaatccccacccagtcacagcatcagtggagtatatttgacatattatagaattgaaccgcttcaggtgttacaattcaatgatttttagtaactttattgagtgatgcaaccatcacaattaatcaatttgggaacatttcatcctctcaatcatattcctcatgccaatttataataataccccttccctcatctccccttaagcaaccattaatttactttctgcatctataattttgccttctctagacatttcatataaatgggataataacatgtggtcaattgtgtcttgtttctttcatttaacataatgtatttgaggttcacccacattgtagtgtttattagtagtttgttcctttctttctttgctgaatagcattcaattctatgaatatatcacattttattttattgatgacatttgggatttttacttttttgctcttatgaattttcacacgtaagtctttttgtgcacatgttttcccaatataactatgtttaactacttgaagaattgcaaaagttttctacagtggtgctgcatccttttataatcccaccagcagtgtatgagtgtttctatttctccacattgttaccaacatttattattaattgtctaacttatcgtagcttatttagtgagtgggaaatggtatctcactgtggtttaaatttgcatttccctaatgactaatgatgttgaacatcttttcacgcacttgttagctattcatatatcttctttggtgaaatgtctgtttacatcttttatctgttttgtgattgggttgtttgtctttattgttgagttcgaagtgttctttgtaaattcttgatgcaagtcctttatcagataagtgttttgcaaatatttttctctttgtctgttgcttatctttttattttctgagtggagtcttttgtttgaagtgccaatgttttaaattttcatgaggtccaatgtatactttttttttcttttgtggaccatgtttttagtgttgtatctatgaattatttgcttaacctaagatcttgaatattttctcctaaacattttattgctttagcacttacatttaaatctgtgatccattttgagttaatttatgtgtattgtataaggtgagggtctaagttcaatttccttggcaccactttaaatttttttaatttttaattttttaaattgacatataatatttgcacatatttggcatacacagtgatgttgagatgtatgtatataatgtgtagtgatcagataaggttaattagcatacatagcatctcaaacatttaccatttctttgtgttgggaacattcaatatcctccttctagctatttgaaattttataacataatattgctaactatagtcaccctacagtgtcagccccatttttgaactactgtttccccaatgaagtgccttgctcccttgtcaaaagtgatttggccataaatctaaggatttatttatggaacagtgccacattgttcctgataattatagctttattaaagtaagcttggaaattaggatgggaaattcctctaacttttttttcaaattgttttgtctattctaggtgtttgcatttccatatacattttaggatgtgcttgtcaacctgctcaatattttgacagcagtctcctgggagaccctgagccagaactgtcagctaagttattctgggtccttgacccacagaaaccgtcagggatgataatcataaatgttagtttttattttaagccacaaaattttgggtaatttgcttcacagcaacagatgactaatacaaccacccaactttatttagcgtgtcctggcatgacatgtggtacctctaaaaatcatgctgctttcagatttgaagatttactgctattgaggaaaagcaaaaaataagtggcagatggtagaagcagatgagctagggagaagagggaggaatgaggaatggggtagaggagatctgcagcagtggttggcaagctatggcctgagggccaacagggccagagcctgtttaagaatgctttttatatttttaaaacactgtgaccctttacagaaaaagtttgctgacccctggtctagagtgctgaaaaagggtctggatggaagataaacattgtggagttatcagcatctaggtaatattggcaattatgagaagggatggtttgatatgtatatctcagttgtgtttcctaggtctgttgccactggagaggaaatatattcttgggtcccccaggcaaaagatcagatatgtaagtcatcatttgggactacccctacctaccccagggatgagggaaatgcataacttacctatatccattcccagcaggctgagagtcttattaccaccagtaaggcttgggctctctgggaaaactgcagtccttcaaggtgtgggcctgtacttagcaagccatggggcaagtgaagacttccaaaggatgactcatctcagctggctgttggctccatctccccattttccctttgtgtccaaggcctgcctccttggccggcatcctccaaggaggctgggcacgtgcctgtggtttccaaagtcatttggacttagccctccaaagcccaagagtaagagaggacacccagttgggcctgtgtccacccaagttggctgactgttctgaacctgaattactatgataactgaaagtacataaatggcccctgataacatctgtgtgggtttttgtataagtccttaggacctgaagaacaaaagtattccgtttgccagatgccacattctgtggatttacccaccacaaatctttccaagcaccatgatctcagcatgctcatgatctatattcaaccttctctgccttatagtttgtaaatccctgcagctgtaggtgaagtcaatcttttctctttctgcttgcagttaaatggaaatcagctcttcaattcacacttaattttcaatggaaaggacccagttccattttatttagtgcaaatagcaaatggcaaagatacagatttcattaattgcttgtgttcccagggagatggaagatgggatgctagacatttctgaagatctctctggtgtgatggaaagagctccagacttggggtctgtcttagtctgtttgggctctcataataaaatactgggtaacttacaaacagcagaaatctattgctcacagttctagaggctggaaagtctaagatgaaagcaccagcggattcggtgtctggtgagagtctttttcctcataaacagggtcttttacttgtgtcctcaagtggtggaagggtgacaaactcccccaggcctcttttataactgcattaatggctttcatgaggcagagtcttcatgacttactcacttcccaaaggccctactccttaatactatcacattggggctcaggatttcaacatgtaaattttggtgggacacaaaacatttagaccatagcagtgtctgaagaactgaattaaaattctagctttaagtgaccttgaatagtcattttttagcctgaatgaaccccagtttacttattttgtatcgtggggattaggctgagtgttatacttgatggcagttataaagacatttgtaccttgcaaatttgtatgcctgaggaaagagatgtttttattttattttcaaaggtgaggtaataggttgaatctctgtccaatgtagagttagagtttctgtttaccaaaattaatattgcagattttatctagttagggcataaatgaacagagagttcctaaattgagaataccatattttcttccagaaaatccagtgacatccagttaataaactcttttcataaacacatgcctccctggaactgatgatagatggggtgaacttgctatatttttcatatttaagatgaaaggcaactttatgagtccccgactaaagcctaagagaatcaactccaaagaaacatagctctcacagtcttcttcccacacattcctcttcttctaaaattggtttgtcttttgttgttgttgtttttattttgaaggattactccctcaggaagaaaataaattcaatctttaccaagattttaatagaggaaatatcaaccaccccaggtcaaatgcaatgggaaagcaagtttgaccttgttcgtgagacaagcatatgtcttcattcatttcatcattctccttgataaagttgcagtctcattgaaaagcttttacattgacagggccaaatacctactgaatttctctcacatgaagatggggaggccgcttctggctttggctgggattctaggagtcagatttaggatggtgagagatagaaaatctggcaagagctttcacggctccctgccattttaatctgcaaacctgaacttgcttttgtgcctaaccatatttagattggtgtctagatttcatatgatctgtttgtttctgacttgcctcccttctcagatggtgcatctgatatcttccttgtagggtttttattccacaactgtcgacaagggatgccatgtctctttcttggcccatgtttgagaatgtcctcaaatccatttatctgaacctaaaagcttgacccctttacatttagagtgagaactaaagcatttggtacaaagtatacactaaggagtggatcttttctcccacttcctctccttcagttacagcacaagatcacagctctgtccacgatcatgtctaactttcattttcatccctttccaggatttaggttcagcctttagtctgctgagacatgagactttagagtctgtcttcgtaggttaaaaatcttggattggaacccagatgtgtgggcagccagctcaggggtgtgaagcttacacaataaattggacataacagagttcccgtgcaaccatttgcaccagttacctttcctttgcagccttgctattgtttgcagacagaatggctaaaggttatttctgatcccttgagggaccttatcaggatttatatcagtaattaaaagcatgctgccttaggcagctgaatgcatccaacagtacactttcaggcaggaaacagtgagttactcccattcactccctaccaactatagcacttatttgaacactttatcttggtccagctgccagaaaactttcattctcttcccttacatgcagggagccgcctttccttggatatctgaacctggaaacatttaacattctcccaggaaataaccccattcaaagctattgtttttaagtgctagagtgattgacttgaaagtaacttgcgtaaatcagtggtgttgattactaaacacaatggtaattactagggaggataatgaaaacacagtatagttgtataaataatatgtgacaattgaaagtagaacctataatgggcttttaatatcatttactgcagttaaaggaacggagttgggaggtacgtggcttgcgtgcttatgctattttccctgtttcctcatgtggcaaaaattgttaagtaatcacagtattttcgtatctgtacctgaaagcttcacagctctgtccactggttgaatccttctcaaccagttcttcgggtagccattatcagccaattagttttctctaaaaaagtaaaataaggttttctatcctaacaatggagtatatatgttcacattggacagtgagttatttaagggtgatgacaggttttattcacctctgtgttcctagcacgcagactcagtacttgacacataataaatactcggtaaatagttattaaacagaacacctgataatgctcaattgctgattaagcactccctattgagtcaagaagagttccccacccagtgtgtttatatgtagaatgagctagggatatgtagatacactgccttccttagttgttaagaagcttttctgaaagtggacagagcccccgaggcagaggcttcctcctgtaagcagccttatctaaccactttagtgtgctcctacatgtgtcatcattttctttgtttagcctgatgtgaaagttggactaggttggatgatcctctctggataacattaagtttgagtaactcacactgatattagctcacctagataatagctctatatttcttgatgaagtatttcaattccttaagatctcagataatcacaatcagaaaaatacattaaccatgtaaagaaagaatctgcctaacaatatttagattggtgtctgggtgtcatacgagactttaaagatggagaggcccaggtagcaaggatctgagggagatctctaggatgtaacagcagcctctaacagctgagagaaacccccattgacagtcagcaagaacgaagcaactgaattctgccaacaaccatgtgagccagaggaccacgagatccagatgagaatgcagcccagatgatacagtgatttcagcctttgaggcccggagtagagaagctagctatgtcgtgcttgggcttctgacctacagaaattgtgacattaatagtggttgtttaagtcactgtatttgtggtaatttattatgcagcaatagaaaattatagaaagtatttttaatctgatctgtttgggtctcttatcagtctcattgaagattttcaatggcctttcggaattacgggacttacccagctctgccaggtattatagatatgtattttcacgcatgtctttctaaatagcttgtaagctagctgaagatggagtctagttcttctcattgttcctccttaaatagtccagtgtagggcttaataaatatttgttagtttggaaggccaaggtgggagggtttctttagtccagaagttcgataccagcctgggcaacatagcaaggttctgtctctacaaattttttttttaattagctgggtgtggtggtgcatgcctatagtcccagctacttgggagcctaaaatgggaggatcccttgaacccaggagatcaaggctgcagtgagctatgattgtgccactgtactccagcctgagcaacaaagcgagaccctgtctcaaaaaaaaaaaaaccaaaaaaaaaaaaaactttttttattgggttgaattgcatttgtaaagcatttggtcttctgcaaaacattcattgccctgatctcaggtgagcttcactgcgaccaagatattgagatagggtagagaaggaagctaaagcacaaaaaggagaagagatttgcctggggttaaaagcaataatctctacagcttcataattcccagtccagtatgctttcactacattagcgctttctccacgacaaggattaggatgtaaagtatcttaactttgagtggaattttgttgcaaaagaccttgagggttctgatggttctaaaccaaggggaacaatgccgagacttttgagttccattttgtattttccagaacattaggacttacgtgcttgtttttcctgctccatttctgaaggacaagataatcaaggaaaatgttcctttgctttataataagatcaaaatgacaaacttgttgccttaaggcattatttcaaaggcattcactctcatgagtatcttggctgttcaaatttaatctgagcttattagagaaattagggttcttggcatttttgaaggtacccctctaatggcattagaccattagatggttcagatcaccagatgatttagaaggactttagaattgagcatactatttcttggtgccaagaccatctggattcttcaaatgtcagcattaattaattattaattaattcaattctttaacaggtatttgagtgcccactatgtgagagccactatacaaagcaccagaaataaagtggtatacaaaaacagacctgctctcagcttctcagtgagccagtcatgttgtaaagctgtccttgattccaaggaagagttttagaacttcaactctatgacctgtctattcaacccacatatgagacagatccattataatcattaccccattgtataacagctctttttttgcctctaggtttattaatccagcctataagcttctctagacctaggactatggtgcctgcacagaagatgtgctcaacatataactgattaaataacttaatgagtaaatgaaggactggactcgtttgtgggccatatttggaggtgactttgtaaactctaacagcatgggattttaataagctgtcttcatagcttggaccatggtaggtattcaatacatattcatcgaacgcaagtgttcttcgcaatcagggaacattttatttgcttcaaatgtgataggagttctgagcctactacccatagggtctcattcccaagggagaaaattcaattatcaaaattttgaacaggcccaaatcagattttctgtcacccctttttgtgcttaggaatctggtgatgttgcaacagctgtttataattgcaacccaaatcccaaattagcaaggcaaagtggaagaatcagctagccattactcctggccccttaaagcacctttaaaaaaaacctgccgcagcgacattgacactacttttggaggctttaaataactaccagttctgactgtgggctcctaagctgagcagcccctgcgcacattgtgtccctggctcccctggtagcagaaagctaatcaacacacccgggaaacccctgttagacctcaggctctgttagcaacaacacaacaaacaaagggcttctgggtgtgaacttctggctgcttcaagaatggttgctaaaataagggggtcaaagctacaggtgttctcagccttcagaacaagctactagtgcagagtcaaggctgggcaagtttggctgggcctaagagaaagttcttagggtaatagtcatggacggtcatggaccattctgcagaccaaagtgacaaagaagcaaggtagctgtgtttgttttcttacaggacatagcaattgtctaattaaattctctgcccttctaagtcattatctatatgacttctggttatcttttgataacacagattggactgcgttatttctgcttaaaattcacatctgaattgccaggacatagagaattatggcaattccatggcaagcatttagtctccttccaccatctggtcataacttacttaccaaccttatctttggccaccattgtctatgaacactgggtttcaacttcattgccctttatcccccaaacatgccatttgctttattcttcaggggacatttggtttggcaatgtttggagacatttttgtttgtcacaactggacaggaatgtgctactgaaaatttagtggacagaggtcaggcatgcggctaaacattatacaatgcacaggacctcgccctaaataatgagttattcagcccaagatgtcagtggtgccaaggtacagaaactctgacataagcacttaactctacctaaaatacccttccttgttcctttctcctgctgtcttttctcaaactggtgaaatgctattcatcttccaagccctgctttaattttcccccctctgtgaagcctttctcaaccccacttcccttcttttgttgctttagttcccttttttttttttttttgagatggagtctcgctctgtcgcccaggctggagtgcagtggagtgacctcggctcactgcaagctccgcctcccaggctcactgcaagctccgcctcccaggttcatgtcattgtcctgcttcagcctcctgagtagccaggactacaggcgcccgccgccaccatgccaggctaattttttgtatttttattagagacggagtttcaccatgttagccaggatggtgtcgatctcctgacctcgtgatccgcctgcctcggcctcccaaagtgctgggattacaggcgtgagccaccgcgcccagctgctttagtttcttggtccaatatggtagtaatattacgtcctaaggtctaatattatgtcctaacctctattaaaatactttaaacattttactttttttttgaaagaagaatagacaacaagggttactttctcatttagaactcagaaaatcttcttaaacctccaattctgtgtttggtgtgagttcataccacaccccgttgtcccgagggtttctgcggattgaagtcacactgagctcagctggctgcatccttggcttgtgggttgtcaccatactgtgtgtgccagagtcagtgctacaccacctcagcccaaacaggaggaaatgcaggcctttcctccgtattttcaaaacccctactcacacaaggcaatcttagcagagtaaattttactggaaggaggtggggaggcagtttgctctgcagcaatgcaaacaatttcaaagtggacactggacatctcagttctaaaagcttcagccacttcacccagcagatgtttccaaagttgcctcccatgttgtgctcccggtgcagcaccagccacactagtggttctctctgtccctgactctcttgcctccacctcacctattccctctgggattagctccaagaaatctaatttattttcaccttcttgtgtttatttctgccttcctcctttccctcaactcgaatctgtgtccacctttgctcaagcatatcaactgaagcactcagaaggaaaaacaaagagcagtacatttccagaatgaccttggaaggcaggtttggttaaaaaatagcaattattttccctttattatatttttctatctgatgccccatctcaaaaccactttcttcaagaacacagactgaaactcctttatctatatttcagggcttaggacagtgttgggtacgttattgatgatcaaggaatactgaagagctgttttcctattttggtgcagatgtggagagaggattgcttgagactcttcccagctcttgagattccatgtaggttgtgaacactgaggagtgtgtggagcttatgtctgaacttcacctctctaatgtgaccatccctgaaatgaaaagaaaaccagtgctaaatggaaataccttctttctttccctcccacagctcgtgcatatctcttctacactcaatcagcatctctagaggaggtgccagctctctcaacaagtaattccttttggccccatcacagaagggaagtacaatcaacagcaatgaagcttctttattccttgctaatttagtgccacgacacatgatatgcacagctttgtgagtgggagggtttcaaagcaggaagctttggatctgacttagggaggctggttatccacttacgatacttgacttagcagaagccagtctttgtgaaagctgttatggggccccctgctggcattgtgacatggagacacttcatcttcagtgaacctacagttccctctgggaagcttcaagttcaacagggctgtggacttgcagagattcttgctgtaggctaggaaagtagattgtagtactagtactactgctagtactacgttttctactatctttgggtttcttgggccactttgaaactctaaccacagtgttttcaaacttgcaatggtaaaatgcattgtaaataaaaattttaacttaaagaatacaaattttttgaatacacaatttatttggaattttatatcatagtagcaagaataagaacaccattaagatattgttagaagcattttcaataagaaaactgataaactgtgcatacaaacatcatggatgaaaggtaatgtagtgaaaaagagggagtgggatggcagggaacataggcagatctgattcctaattccagtcttgccaacagctagctctgagaacttaaatcatgatctcagtttcctcatctctctgtaaaaacaggataacagtagttatcctgccaagagtatagatttgcaaggtggatctaaggaaacagaggatttggaaaagtttggggaacttaaaatagttttgcagagaataacaataacattggcgttatctgggctacaatggctaaaccaggtgatggtcttgtagcagtcttttgagagagtgggccatgatcatggcaaactgacattgtccaggctttctgcttaaatgggccctctgttgtttggagttgcattcactgacacttttcaagcagttcagacagtgtggggaggagtaagatgtggttctggatgatggtggtatgaaaaccctgaaaccactatgcctaggagcctcccacagatttttggagatccccaggtggtcactgggaacattccttcagggcctttcaagggtgtttactgtggcagtgggaggggccctggaattagataccatggagacctccctgaaagagaccctgcagttccatggcctcaggctaaccacaaaaaaaacaagaacttccggttcagtggcaaataccattttttataactggggacctaatcattaaaactaaagggcttgtgtgcaattttaggtacaggaccaagactagtcttcccaaagacaggtccaggagggccttccttcactaatccatcatttttctgttaccctgaagttaggttcctgtccatgaatgcccatcctgtttctttatgtgtgtggggggtattttctccttcaagttggtacaaatcccacaaaaggctctataggacatgtcagtgttgggaaagatggaattctatgggtactgttcatctctcaggagctccaccacagtaagcatattttacaagatgtgaaatatatccattaacaaacttgaggacggcaaaggagttcaggaaatagatgcctatggctgataagaattaacttcagaaggctctttctcaaccctctgtctcactcctagttgttgtaggaaagagagggcacccttaagtggggcaattgagggaaatttaatgaaatgactatttacaaagaagtggaacagttaaaggaaatcaacaagggataggaaagcatttaagagctagcaatagctgggagccattatcatcctcagatctgatggggtaaggggagagagtggttatgtgagtacaaagaaaggtgtaggagagagacactgaataggaaccgaaggcttgggtggaggaacacagtgactaaaacccctagtccagcaacaagggagcagggatacggctaccctatctcgttatcttcccacccttttttctccttccagggcttcccattggccgaacctaacaggaagccaaaagacaagaacaaatgtggaggctgcacatagtcccggggcggggggcgagaacctttcagacaggaaaatggaacatatccagcatatttttgttgtctaaaatatcctatttgagaaccaaacaaacaaaaacaacaccatgatttagtagaaagagcatagagccacgattgagaagaccaacattctaatctagtcccagctctgctactgacttgccaaaaagtcttgggttggccacgtggcacccctatgtgttggtaccttcccttctcccttctctagggtgctgtgtggatgaagagggtttatcagtacaggtgagtggtgaacgtgaaaagaacagctggagccctggtaaggagatgggggagaggaagcagccacaggtgctgtaacttaggaagagggagaagagtagtaatggggacactcataatctgatggtgaaggaataagggcaggaggaacaaaattatgagattaagccaaaccccgagacgttcctctcctctcatgttcagcaaggcattgggggatgttcactgacagctgcagatgtaagcattaacaagagaagatagggaggctctgtttattcccgggtaaaaggaacactaactattttcagtttgtggttgcttgctgttcttgcctagttgccagacagcacatcggagagagatgatcatgcatctcaatgcccatgggtttcaaatagactcggtctctgtttgctgctcattctttagcatgagtcagtagagtaggggatctgctcacaactaaagagaatattagaagagacaatacctaagggatatcaatgaagtacagaccttacccaagtctcacagtgaaaacataggagaggagtgtgagataagtggaagagttacaagagatggatcaaaagcaaatgtgtacaatcccttccacgcaagggctaagccaggtagagagaatatctgcacagacagatcactgctggggtgagatctagatacatggagctgggttcactgtccttgttccttgtttggtgtcttctcaaagccaccaagatttggaaaggccacagtcaggacaagtcctggtttgctattccaggaagtagaagtctaagggaagaagagcaaacaaagtcaagagaattcagatttaaagatatagagcatctaagggctctagatacttccaatcacaccttcaaccaaatcttccaccaggtcctataagaggcacctgggacttgggaaactactccagataccacctaggttgccctctatttcaacactagtcaatgatccttctcaattcagtcgtcccttactcagggaaatcttttgtgacctccctgaccaggtcaaatcctccttttacagccctgggggacactgcctgtgtaacacttacccggttttacaatgattttattggtgcctgcctctcccatagtgtgtaggctgcacaaagccatgcctatttgcagagcattgcacacccagatcctaattcaccctatggagctgtataggttctttgttacatcagttagatggatcatggagcaacaaataaatgtctggtttctcagattcttggcctgtttcctggtacctgggatctcttgctcagcttggcctcttgacattgatgattgagttgcatcttttgcctggctttgggaaactgcttggctccaaagtctatgttaaacagattagataaccgtagacacaggaactacacaagtgatagaagaacaaagtagttgaaggtacaagtaagaaggaccaggactattgatgacaagaaagcgaggttacaattcatttttattgagttttgacctgcctgtatgggtaaggtgtagaatcaagaaagccatgagaggccgggtgtggtggcctgtaatcctagtactttgcgaggctgaggtgggtggattgcttgaaatcaggagttcgagaccatgagaccagcctatgtgacacagttaaaccctgtgtctacaaaaaaatacaaaaataaccaggcatggtggcatgtgcctatagtcctagttacttgtggaactgatatgggagaatcacttgagctcaggaggttgaggctgcagtgagcagtgatggtactactgccctctagcctggtctagcttaggtgacagagcaagaccctgtgtcaaaaaacaaacaaaaaaaggcaaaccatgagaaaagaaactcaaagaatgtcctgaagtactgtactgtatacaatcaagcaatttgactaaaggaatattgaactcatcaatttagaccctttagatctctatatgtgaatagctttcttactgctctcttgtgtcttgtactcctagtttattctgaagaatgcctccaaattaatccctccaaaatatctgtttgcttcaaaattgctttcaattcacacacctaaagaacaaacaaacaaaagcattcacctctttaatggccctttctggtagtatttcccatcctggaggccccaggttcctggaagactagaattaagagttaagaatgttatttttgactaattgtttattaagcactttactagatccaaagtactctgctgaatgcattgtatttattttcatatttaaccttcacaaaaaccctatgggatggaaactctcatacacattttatagatgaggaaaataaagctcaaaaattagtaacttgtttaaaatcagacttaaaatcacacattcagggatggagtcagggtttgaatccatacccatctaatcctgggacttaagctctcatggaagcaatacagtagcagaactgtgtaagcttttttttgctactccaaaaagcatcatggagctgatagtataaaggctttggggttacagccatagcctgtgaagtaagagaccaataattttcttcaccataatagtcataatggttattatcactgtcattgttgtagatattaattgaacatccagtttgtaccaagcattatattctaagcattttattttccatatcttcaattcctgctttacacatgagaaaacaagctgaaataagtatatcttgattttataaacttagattgtaagttgcatgaggacagggatgctgttttttgcttactattttatccctaacacgagcgctttgcctagcccagagatggtggtcaataatcaaatattgatgaatgtagtttatttggttgtaaaatacctgtagaccctctattccttcaacagttgcaaataattattatgaaagatacatgaattcatgtaaaagggggaaatttttgcttatgaaatgcctggactgatagtggctggtcaaagagaagcttatggctcatggtgagaaactgttgaatgtgaacagtactcaagttggaatataagctattgagaagttttgttaaagggtgatatgtggaaaggaaaaaagttaatgttatgtatttttaaaatagaaatgtaggtgtataaatatatatatttataaatgaaaacttgatttatgatacagagaacttcaatgcaagcaaaaagattgttgctggggtgaatttcacgagcatgtcaaagtaggaaaagaaagttggatataaaatattttaaaagacatacactgaaatctttttaaaaatgctcataataataaaggactagatagtgctgatttgtatttgcttgctgacaagtcagccagtagaatttttattgtttatgaacaattaaggttgtgatagataacttgaaagccgctgtaatctctgatcatacaataattcatttcaccttctcaaaagctaagaagttctttctatgaaatcctacaaaaatcttttgggaatagaaaggaaaaaagataaatatttaaaatggtgaatctcaaaagcatggaatctgtagtctcttttcttgatgtatcataagtgaggaatttttgggtgatttataaaggaagctttcaagtgaataaaaggaaatgctgatgcctttgaagaacaaacacagatatgcatgacagcagaagaaaagagaggaagatggtgaagaactatgagaccagatattgaaaatcagaaattcactgaaacatatccgttaagttcaaggtgacgagggaagaaagagatcaagtgggacaaaagactgcctaatacacacattccagagtccatggaggtggggaggaaaaagggtaaggattctctttagaaagaatggattaaaattgtgccaagaaataatctgttgataactaagagtctttcttctttccagaacttgtctgaggcaacaaagagagcaaagagaaagataaagatggagtcctcaaagaataaacatgattaagagcagagcccacagctccagatgtgaaaaccatgactcgattgtcagtgaggagagactggtccctggggtttgctgacctcccagggagcaatgcatttcagagagctgtcagagcagttttcttctttaagccctggtttgttaattattattttttattatttaaaaaatgttttctatcgatacataatatttgtatatatttgtggagcagattttagattgcagaattcaatggtctaagggagaagagatgaacaagcttgatgtaacaaggaaggttaagagtgatatttaaatggaaagggaagtatatattttattgtttcctgttgctgtaataaattatcaaaaattgtcataaacttataaactggcacatttataaactcacaaacttataaacttataaactgccttaaaataacatgaatttattattttacagttctggaggtcagaagtccaagatgggtctccctgggctaaaatcaaggtgttgggaggctgtgttcctttctggaggctctaacggggaatctgttctcttgccttttccaacttctcaaagctgcatgtgtttcttggctcgtgactccacaccaccctgatttctgcttccattgttgcatctccttctccgactctgacccttctgccacccttttatgaggatccctgctgttaacaatatgttcatcaaataatacagagtaatttctcctgcttaagatcctcaacattatcacatttgcaaagtcccttttgccatctaagctgacatatccacaggttcccggtattgatgtgtggacacctttggggcatgggcgttattctgcctaccagtttcctattgcttctgtaacaaattaccataaatgaagtggttcaaaacaatgcagaagtatgatattatggtcctagacattagaaatgcaaaatgggcttaagtgggctaaactcagggtgttgttaggaatgcattcctttctggaggctatagggcagaatctatttccttgccttttccagtttctagaggctacctgtattcattgcttcgtggtttccttccatttttagagccagtaaaggtcagtccagtctttttcacatcgcaccactctgacactgacagttctgtatccctcttccacttacgaggacccttgtcattccattaggcccacccaggcaatccagggtaatcttctgtcttaaggtcaactgattagcaacctcaattccatctgtaacgttaattctcctttgccttgaaacctaacgtttttacaagttctggggattaggacatggatatatttgggtgagggtcattaatttccctgccacaaatattatcctatcggaactcctagttcaagataccattaactccattttatgggtaaagaagcccactcagaagggaggtgccttacccaaggacacagttattttcggaagcagacttagaatagaacccaattctctatgaccccaaagcttggctctttccactgaaaatattagatactgaatgtgactgaaaatatgcagtgtctatcataggctgtaaagactgattaaaatgagaagggtcctaaagaagaatatgggaatgttcccaaaagatcagggaaagtctcttttgttgagaagcttctgagaaactatcaagcatgccaaagaagagagggagcaagaaataatacagaaaaaagaaaaataaaaaaagatttccataaagcttaggaccaggcaaaagatttggtgcttcaaatgcttctgcaaattttttttgatgatgtcatcatactaatgggaactgggagaaaagttctttgatcagtgtttgcaaatttcctaaaccttgggttagtatctgactgctgtgttttatttgatgttaatgattgatatagtttggctctgtgtcctcacccaaatttcatgtcaaattgtaattcccaatgttgtgagacggacctggtgggagatgattgcattatgggggtggattttccccttgctattctcatgatagtgagttctcatgagatctagttgtttgaaagtgtgtagcacttcccccttcgctctctctctctctcctgctccaccatggtaagacatgcttgcttccctgtcaccttcctctatgatggtaagtttttggaagcatcccagctatgctccctgtacagcctgcagaactgtgagtcaattaaaccttttttcttcatgaatgccccagtctcaggtagttctttatagcagtgtgagaacggactaatgaaatgatttaaacatattttattttgtctttgaaaactaccaaattcattttgcaaaaacagtataaataaacaaaccaaaatataattgtgtgagaaaatatgaatataaattgatgttatgtgattagcatctttatgctcaatgggcaggaaaagaaactaaaaccataaagggcaagagagaaagttccccatgtggtcttcataatggagtaggctttacatatatcagacaacaaagaagtggtttgtaaataaaggacagagataggagagacataagtttgtccagccacaacatgtatagatacaatctttctggcaatagcagcatttaaagcacatggattctaccagagaacttggaatataaactccatgaggacaaggtcagtgtctattttgttccccttggatgctcaagttgtaaagcataaacatttattgaatggaccaaaataacatttcttcttcaataaacatttattgaatggaccaaagtgagtttaaaaatgcaaacgcacaatagattattttaaaaagcaaagacaataaaacgttaataagagtgtaggtgcaaaaatatattttttaactggggagaaaaaaaggcagcagaagagaaccagctatccagaggttttaaagttattgttggagaaaagaccaagcctgattttattgttctgttgtatctttgttggtatacttcttcaggggtttcactgacagcacagcctggtgtggcatcagcctatggctttgtgttcactttagtatgaatacagaaagcagacaaatttgaggcatggcatcagtgcaaagggacttgtaatattccctccaggtattgttaggagctcaatgctgctgacgagggaccacagtttggattttggaacacctatgggaaaatagtgtttctctgaagtataaagattttaaaaagggaaagatttagatcaggcagaaatgaagtagaatgaagcagatcagagggtacaaaacccaaaaagcaaatgctgaatgttgttttcacttttatatttgagctgtgcaaacccaatgtcaaaaccttttacactaaacaatcagagagaatcaaacaggagtatgtataaataagtgctttgggaaccatgagttttacaagaatgcaaatcacttatacttgtgggttctcaatcaatatttgctggttggagatggcagacaaaatttgtggatgctcatcaaagccccaggctttgtgtcagtgactgacaactaagaatcggtgtgtgttgtgtgtgtctatatgtgaactttttttgtgtgtgagttttaacatcaccaaagaacctaaaaggaaaccaagcataaaaagtgccattaaaacaatattaaggttctgacagattgagaaagggagagaattcagtgttaagattgtcagttttcattcattttaaatactaatagaggataattgcattgaaacaaaggataaatgtttgaggtgatgtataccccattcacccggatgtgattattatgcgttgaatgcctgtgttaaactatatcatataacccagaaatatatgcacccaccatgtacccacaaaaattaaaaattaaatcccctccaaaaaaagattgtcacttttcaacccaagagtcatgaggggaatgcatcatagcacactcaacccaggaagtcattaagtaaggtacaacatgagaaagattgcatgcctcatgcagaaataggaagcctcagaaactgctaatggaaatatgaaatggtgcagctattttagaaagcagtctggcagttcttcaaatgattaaacacggagttaccatatgacccagcaattctcatcctaggtgtatacccaaagaggaataaaagtgtacattgatacataaacttgaatatttataatagtattgttcacaatagccaaaaggcagaattgactcaagtatccatcaatggactcatgaataaacataatgtggtatattcatacagtggaatattattcaactatgaaaaggaacagagtactgatacatgctacaacttgcataaaccttgaaaacattatgcaaagtgaaagaagccagttacaaagagtacatatattatgtaattcttttcatatagatgtccagaatagtaaaatctgcagaggcagaaagtaggttcatggtttcttagggctgggtacagagagatgacaggttttatttgaggtgacgaaaatgttctaacattgactgtcatgatattgttcatatttgtgaatgaactaaaaaacattgagttatatactttaaatggatgaattttatagtatgtgaattatatctaaatgcagctattttttaaaaaaagattgcatgcctcatcccaaagcagtattcatcaagggtgtcctttcaccttcagtccacagtctctacaagtggcgccccatctccatccctccaggcagcctgtactcatggctcctagcagagttagaatacttggatctgaatgtccaggttgtatgaccacaggcgagtcatatgacattttaagcctcagtttcttcctctgtaaaatgcaaatagaacctgcctcttaaggtaaagtgttttgcaagtgcctggcatattatacacacataacaaacaagagctggcactattattcacccatggcacactcaggcatgctgaggcctgcttgccaaatggggccgtcttggagacagttcccacaacaatattttgtaggaactcttggaaataatttgttaaagtttttcatttggaaacttgaggtatttttggagtctccaaaatgaaaggtcgtgttggatggtagcagctggtgggaacctgaagctgaaactgggtgagttttcatgagttcacatgggcgacttcctttctctcctgttagctttgttgttgctgtcctatagaaaggagtgaacctggacatcaaaggctcaaatgtgatttaaccctgtgagattatatgcaaattagcataacagagtgactatagtcaataataacttaattttacattttaaaataacttaaagagtgtaattggattatttataactcaaaggataaatgcctgaggggatgcataccctattctccatgatgtgcttatttcacattgcatgcctgtgtcaaaacacctcatacaccccataaatagatacacctactatgtacccaaaaaactaaaaataacaaaaatttcaaaattctgtccagatgcacattcttctaaggagagggcttccaactctgaaagaagtttacgatttccccccaaatatttaagaaactgagagaataagtcaagacataaggattccagaactaagtagtctttttttttttaagtcctacctgtaaactttttcttacaaacttggccaagaaacaaacttatgtcttttggtgtttgtttgtcattatttcctttattcatcaaaattatttaagaattttatcatatgatttaccttaacaagagtaactaatttccagtagtgatgaatataattttttcccaaatggatgcagtagaaatagaaatatgacattacaaaggattgcaagactgttgcatttttttcctgcttatcgtcactgctgttgatttatatgccatcagtggagaagtgttaacagcctgagttatttatctgtaacatggtttgggttctgaaattattcatgctactcaagcactgaattcttagaagatgtatactttgctatttttctatctactggttatgcagtcaggtttataaatatgccataatgaacgtgcctgggaagaaatgaatttttatcagtgtctattatctggcaaatatttttaaaaagactgattttttttaacaaaagactaaaactcattacttttaaaagcgcattctgcatgaagatgttggttttattcttttacaaatattttcatggtatgtaggaaagtaattttctaatgggtataccttgagtaatttaagtaaaataagtagagtcacgctattgccctaacatcatttattcatatattcattaaacatttatttactgagggctgctatgtcctggaccaaggataaaacagtagaaggtagagaacctgctgtaaggcaggagctcaaacatgttatttcccttcccttgctattggatgaaatcactgtgccaaaaaattatgattcagaatcgttaaacgttatgtaactgaaatgcattggaagccgtggtgtgaattcagggctgattttcagagagtgtccatcagtttgtagcaaagagaaaatacacaaaaagttgaaggcttctatgggaattataaaatttatgacttgtttctaagtcaagggcagagagaacattcctaaataaacacttttctcatctagacaaagagaaggaacagaagacgaagctagcaagcttcccatgatttcactgcaattcattacgtgaccttctccagccacactggacaccctttcacatttcctccccagcaatccagaagccctgcaacagccacctttaggaaatctttgcagtattaataaaaatacttctctgagcggggggccaagtactttctaggcaccactaaggagaattacccaggctgaactaaactgtattttatccagattaaaaaataaataatatttatttatgaccagtttatctctctccctcccttccttccttctttcttctctctctccacccctcccttccttccctttttctttctcccactacgttatatgctcctttgaaggcacaatcaagtcagtctttttttgtcacagtatcttagcaccaaacagagtgcctggcatatagatattcaataaataattgaatgaatgaatgaatgaatggatgagtgaatgaattcagcaaatatctgtgaagagcctaatattcatgaagaatggtgctaggccctgggagtggggatggaaaaggaaatggatcaaggatgaaataaaagtcctatgttagtgaaagtctatgcccttcctatttagccaacatttgacctggggactcggcttctgtaagtcagaagtgccagacttgtgttcttttataccacattctagctgcatgagcttaggaaaattattgaaatctcctttggcttcatgtccttgtttctaaaatgaaataatgtttacttgtcttatttaccaggattgctgtgaggatcaattgatttaatgtgcatgaacacctctgtaaactatgaagctattaggttattttggcctaaacaggagatgatgcatacaaaaccactaatcattataaaagtaaaatgattatggcacaacagaagttcagataagatgccatgcatgtggatcacactgcaagaatagtaattagaatagtgctgctaactcaatagtactatcttcaatatcatacattaggaaacttattcagaaaagcccagggtcatgcagccaattctccttagtggtgcccagaaagcactggccccagttccagagtcatatttttatgagtagtgcagattggatggctagatctgctctttcattgaactctgtgtctattccaaattcagttcagttggttagcatagaaatatatcaactatagaaatatatcaactaaaagatagtgacgttgctgccatttttctaccatttcattttttgatatccttctgggttcaaacttagatcacacatagaatacgtatcttttctacacatccttaaaggatctcaagaggatcttcacacataaatcaggagagggataagcttgtgtgtctattaaatgctaaaatgatgttcaaattatggaaaatccttacatcattggttcaagggaaaaaagaactggacttcttgttcaaatgaacaggcagtcagtttcaaagaagccgcagccagaggactctagtttgtcttcatctcccactcaggacattctgtcagaataaagatgtcatgttctcccaggagaaatatatccttggagaaggacagtgcaggttaagcatgtccatcagtgtgagctcaggacattgtcaacaagtagtctgttttcatacactgcagcaggttacccttgtgacctggtctggggttctctatgcagaattccctctctctgcttctgtgggtgttggagctggaaggaatagggtatgtccctgcaaatcctgttggctgctttcttgtgccactcaagttgaaaagggcacattacatgtgtccctttggggtctggggaatgggttcctggaaatgacagtgaaaaccgaatcagcatttgttcccggtggttctagcatagtacctttgaattggtgttccagacgtcctgcacctgcatgccctcatttttttttcttcaaattccttgaagtcgtgacatgcctctgacaattgtttttcttttagctactgtactttggattgttggcccctcctctgaggctacagtaaggcttatgctggccattgcaaaaggattttcactcaacccacaattgtctgcctatctttatcctctccttcctcagccatttcctgggagatgccttgacgctgggaaaaacgtatgaattttgtcatcctgcttaatacttcttcttggcattttggtggcactcccagaacatccctcaagaacagagacttcctgttaacaggctcctctgtctgttggccaactgtgtaaccttgggcaaatttttaatctttctgtgcttcagttttctcatgagtaaagtggggaggataatagcatctacctcatagagttattttgaggattaaatagattaatacagataaagcatacctgactcataataagtactatatgaggataagattaaaaagaaacaacaacaaatactctcactggctggtaagggtgctcattcttccatgctgtttgaccagccattagatgacatatacatatgtgtgtgtgtgtgtatgtgtgtgtgtatgtatacatgtagatatacatatacgtatggatatatgtcactattcagtgctgtaacatacacatcttatgtatatgtatgctgtaatgtatacatatatatgtttaaaattgaaatataattgcagacaaactctgccgtaaggtatcaaagcttaattagggaagcagtaaacagtaagatgtcatcgaatttgttcttcaggttttatcatgagttacaatatgcttcaaacatcaagtaagaaccaacatctgcttcttggtctttctcatccctaggggcagcagcgtttgcctcagtcttatgattgaataatgaattgattaacgaacagcagaaccagtgtttccgctcttttgttgtgtctcctattattctgttagaaatcaaggtaccattggttataatgataatagagagagtaattttggttttcttcaatgcctgctccatgcttgatcttgtaccaagcacttctcagcactttacacaataaaattgtaacctcttacttcctgcaccttcctcaaactaggaaacttcacttcttcagaaagaacataccttccacagatcatcaatgagcattgaggactacattgtagatttgtaggagatgcaggacagagtctattttccatgcgacacagcaaaatatttaatagaaatccccttttagatatttctgctcccttctctccaaattctctcttcccagtggtacttagattctcctttccctcaatttctgtcctatgatctgaaggaattaagttcactgaaaacttgcacacccctttcagcaaataaagccccaaaagtaagtggagccatcttccatagaatgaagtagggtcgcttaattgccagttggacatagtcctctaacccttaaaccaatgatcaaagtttctttccagtgacttagaatcctctccctaaaaggaatcctgatgctaagaaaagtaacattgttttccatacatttacatactggttagcaattgttttgagcacttacaatgtgctaactcccatgtcttgaactttacacccattatcatttatgctcaatagctctatgttacccaactttcttggaatcaggtgatgcttgctaaactaccaggtgggacacagtagagagggggctaaataggagcaggaggagagagggaaagggaagctagagcacactggttcgaagtatgagtccgaaactagactgcagggtctcaaatcccagctctgtcatttcttgcttgtggggcctgcttgagtaaacctttgtagaggtaaatgtttaccattgtaaacctcagtttttttctcttattcaaatggagatcataattgtacctatatcatagaactgagatgacaattaaatgagatagtatttatcgggtgcttagcccaatgcttggcactgagtatgaggtgttcaacaaattatttgttattcttcttcttattattactatccatagcagcctcacgctggtcatgttgataattcattcttctatctgtagcactgctttttttcttcctttgagatggattctcacttctgttgcccaagctggagtgcagtggcatgatctcggctcactacaacctccacctccccggttcaggcgattctcttgcctcagcctcctgagtggctgggactacaggcatgcaccaccatacctggctaatttttgtatttttaatagaaacagggtctcaccatgttggccaggctggtctcgaactcctgacctcaggcaatccaccctccttggcctcccacagtgctgggattacaggcgtgagccactgcgcctggcctgtaccactgctctttcatctaaaatgaaagggagaggggcacggtggcatgagcctatagtcccagatacttgtgagggtgaggtaggaggatcacttacacccagaaattcaaggttacgatgaactatgatcacgccactgcacaacagcttgggcaacagagcaaacgccatctctaaaaaaatttgttttaaagggagagggaataataatgctttgctcttcccatgtattcaaataaaaacttgaggcaaattaaattcagcagaatttaactgagcaaagaactattcacaaattgggcaaacctcagagccagaagaggttcagagagttcccctttacaacatgggcggacagcatttatgaaaatggaagtgaggcatagaaacagcttgattggttatagcttggtgtttgccctatttgaataaggtctgatcagtgatggattggagcttagctgctgtgatgggccaagactcagctatttgttacaaaagtatactcctaaagtcggctttcagttagtttctgtactaagttaggttgcagttgttacataaggaatcaaagtatagagtcattctcaggccaaatttggttcaattcaacacaagcaacaagaaattcaggaatgataagtataaacataccttggaaaattcataaagaaccacacaaatattaaggaataccattctcaatagagcattactggaatagaattaagaactgcactaggtccatgtgattcagagtagaagttttcatttaattcctaagtcaatttatcaagtaaagcaattcaacacatctcctctccccagagaccaatccataactgtcatttgacacatttacagcccacttccttcagagaaaatgcttattgaatgttgtacaataaaccatttcctagtcttggtgctgaacaacagtgacccacaggccccttctctgtttcaatgagctaaatgctggtggtttttttttttcccccacagcctaaccaacccagcttcccacgaaattccaaatggattaactctttctgctcaagggggctcaaatgctgagctagctgaagtgtattcattctaaaactggaaacagaacaggataaaatagaccatttgagttttccttagagcttggctcttctttgctgtttcaaaatctctgactcaccatttgtactgaacaaaaatgaccaggactccagaggataaaagtacatccacactttacagccacggtatctctgccctgccagggttcaaggttcaggttttacctaaaggcctcaaggacttgatacctgtgattcctggactactctcttaggtagaccttttaacaaactccaccttggtgcttcttgttagttaggctggtcttgctgactctgtgaatctggagtctcgcttttgacaccagggaacctgcctgttcctcactgccttgtctgctttagagcactggtcagtaagtgacaagctagcttttgacaccagggaacctgcctgttcctccctgccttgtctgctttagagcattggtcagtaagcgacaagtcataggtttgattgctgatgcagagatttgaaagttgtggctgcatgggcaagtcagcttaacctctttgagtctctatgtctttttattttttaatctgcagagcggggtttcatgagtttctccatatggatgttatgataattaaatgaaataatgaatacagaagttgcttttacaacaactggtatatgagatggtctcaagcaatattagttaaagttgggtgtttatctgtgcctccaatatctgcctccttatagtttccatatcctccagatgcttctagtgccgacctcagctgccttgcccttctttcattgttatttttatcccttcaagtgcacacactgacctttgcatttgatgcctggaaaataatttgtctcaacattctaagtctatgtcaattaaaataaatttaatgcatttctcaaagcctccacattcatttctactggaaaaatccaaatgcaaatgagacatctggttctcatgtacagatggtctgtgcattatttgcatctttgtcaaatcaagctaatgtgaaacctcatgtcatatggtctgcatgtcctctgtttctttgctagggattatatatgatgaaaaaatatgaccaagatatgatgaaaatattttctgaagtcacactaatttgtgttttgctgtaagtcaaatcacttgattgttctgataaaatatttgtcgagttttcccatgtctgtggcactgtttttgattctgtgggaaattcaagaaaaccatgctgtagactctgctcaggagggtaacatcagaagccctgccatttcatagagaaagcataggattatgcattgcaaatcctaggactggcttttgtcattggagtcaagttttccaaactctaggtctgatgattaatttaaaatcaattaaaattgagtaaagattttccacatgtatactattactactagtagtatatggtctatgatgaacaagcttcagtccttgccctttaagagttttcagtttgatcgagagaggcagaaaagtaactggataattgtaatacagtgggattagtgcaaacgtcattcctataagaaggcattgaaagcatgcacttgcacacacatacgagagctagggtggattttagtcccagctcaaatgccagcttcctcctctcaactcccccagcattttatctgaacgtccatgatggccctgttccatttttgcatcctccgcaagtatttgtagaatgaatgaacaatttccttaccttttccaaacacaggaagctggtatctatagctgaatagttactgctcgatatctgatcctgcatactattaggcaagctgctagggtagtgataaagtcccttggaacctcacccctgagaacttatatctttgcgtgaccctgaaaagggtgggaattcaatgaaatgagtaaattatcaaaaacaaacaagaagaaccaaactctggaattttaaacacggatgaccttgcctcacataatgctgagggtcatatgaaagcccactttggccaaagcatcttcccaaaaatccacccaagaacaccctccttccttcccttcacccatggtccccatactcctcagtttgcttctccagcccctgtgtttactctggtttctgtctctgtgcctgacccttctcaggtctagagactggctgtggcgcccatatctgatctttgtttccacctttattctctgctgtttctgtctacttgacctgagtgtcatgtacgacttcaagtaaagaactcccacaaggtggcttcctctctaagaaactctcagcctaggcaggtccccagttttccattagggagggagactttggataagtaaagaaggatgggattgaggtgtctgggttccaggtacagcagttaccaaatgcgtaatctcagataatggattttacctatattttgcctactttcccatctgtaaaaatggaggtagtacctacctcaggtgcttgtgaaaatcaaacttgaatcaatgtatgtataagcgcttcagaggaagataacattaaaaaaatagcagttctttcctctctcacctctccctcatgtggcctcagtttcctcccaggcccgagtgtcaatgtgatattcttcttaaggcagaaggattaggaaggccccttcctaaggacattccaggcttacctatctttgatgctttttcctggtcttcaaagattatttcctgttcactctctcaattcatctcaggaacactgaagtatcccccagtctgatgcatgccaattattttgcagctaactcattgacagttgaacatgacatcaatccgggtattgataataataataccaaaagaatcaaggtcagcaagaaaggactcatgatgtgttacatcatttccaacagtctcaagtaggactgttctggctatcttattttttacttttaccttaaggattttatactgcctttgtgtgtgcctaatttttgccttagtcatctgggtctaagtggttccttattgcctgagcctgaccctgatgctctcttgaggaggaatttgtaatcttttgttgacacactagcagtgtgggtgcatcaagaaagagaagcaatttgaggggttgttaaaaaagccaagagtgcattccaagacatggaatcaaaagagtatgtcagaaggagcccaggttttcaacaatttggcttttatcctctaccttccagaactatgactaaataaatatccttgtccttgatctttaaaggcaaatgggacatttaccccattatgtattagtctatgtccatctccatctccttctccatcttgtctctgtctctgtctctgcctttatctctgtcactaatcaatgtagagaggtgtaccaatgtcttttgggaagtttctgcacctgtatggccattgtatgtcatgctatgtatgtgagtggacaggtcggcctctatatttttttctacaattaagtgcagatgcaagcaccagtgagctccttataatacaggtttttgtgtttgggacataagcactgatttctggatcttggagttgaatgccatcattgacaggaaggagcgaggtcagttgctcttcagtccaagaggtagaaggacccccaagccattacattcccaggcagacaaatgaaactgttacagaggctgcttctcaggctcccagtctttccatccagactttatttcatggcagatgagcatgctctaaaatgtgaagaagatgagaaagtctattgaggatcagccttgaaaagatcttgtccttctaccatattcagcaatcggtgaagcatagaagacagggtacacatgctctccctggaggaagtacaacctagcactgaggccagtgtctgtagagccaggctgcctacttcctcattctgccctgaacctcttatttcctagccgggtgactttgagcaaattatttatctccttagactccgttttcctcagttagtaatattgctgatttcacagtgaagtctaatgcttaaaggacttagaacagtggctatttacaggtagagctcagggaagagttatctattattctatgtcctaaaatctaatgaagggcttacattctttgctctccttcctcaatctcacatctatcctgcaaaatgtctgagaagttattttccccgattttcaagcatagaaactgaggcctgaggaaacaaggggaaatggtctgggtaagaatgaagctgtctaaatacagaaaccaaagctcatgtttttctcctataaacgattctacaacattacttgctctttaggatgggaagaaaggcataattttaacccaaattcccccacaatagtttggggtttctttgctaatactccttttattgttcctcctctacctccaaagaggtcttcaacttttccttgagtggaggaaaaataatgtctgcatcatacatatacagcaaaaagcctgtctctcatccaccccccaacccctggttatatacaacaaaatatcatgaatgcaaggtgtcttaaggcagggattttaaaaattgctatatcctccactagaaatgtgttgaataaatggatggttgatgattcatttcttttggtctccttttatcaggatctcattaggtgtctggtacttcactctctcaagaaacacttattaaaaaccgagtatggtccagccacgatagcagatgccaggagtgcaaagacagagacagaattgatgctttcaagagcccagaatccagtaaggaaagtgggaaatgtagagagattcggggacacaaggggtgttcaacttttgacattacaacagagtgaaggaattgatctgaaaatcccagcttgcattatgtttgtagtgtaaatctaatggaaatcgtcacattagaaaacttagcaaaacaatagacgctgaaccctaagaaacataaaaaatatgtagagaaaggaaacaatgctatgccatttttctgcaggtaagaagtgtttcaaccagatcgttgttgttgtagttgttgttgttggtttgaaggaactatttcccggaaatgtttacatatgtcctttgcaggcttctctttgccactatatatggtccaactcattggagatcctaatcagcccaaggacccagaaataagagcaaccctacagctaaccactctatgtaccgtacctcataaggatataactgagcctcttctggctatatccactaggcctgtttttggcttaactgagctaactggccataggcttgattgaacttgagaaatgagattttggaaagaaaatgtgacctttatcaaggattcttattaagtatctacctgtatgtgggtgctgccagatcagcgaagagtgtgtcattctgcctgccttctgatggctcttaatctagatgttccatgtatatagataaaggatggtaaaggggcttgaccctttggcagttgcattcatggccttccagaaggaatccaggggcctgcgctttggcttatctaagcatcaggatctcattaagcctccatgtgtgagtgagaccagatctcttgacccggatactttcaagttgtgtcaaagaacatacatacttgcctatcattgaaatatcagcatcacaggacacccagaaacaccacgcaaagggaacagaagaatttgaagaaacaaactctatccatccagaaactggtccatcattggcatctagagagaggtagaaaagaaaatgatgtggagaccaaagagcttgcattctgcctgagtctagaacagacaccaccaattgctccacagctagcagatcataatcctttgcacacaacatggttatcatccagatggaaatcccaacattgtaacatatgcctggggtgataaaacacattgctggagcaaacctgtttctgagagaagtttctccagggaaagttggactcctttctctccacactgccacacaacctaggtacgatgtagccaggtgaccaaccctatgcacacattctagtctctttttcagacctatccaggttaagtgacttgcatgagaccacccaggaaacaggtgattcactggtgcttatccttgccagagttttatttccagccacatcttctctactcattgtttcttctcagtctaaatgaatctcttctttctctccaatatagactttttactcaagccaggccagtttactcaggcaccttatctagagtactttttcatttctcccttgtccacttcatgcttttataatttggcacagaggtcacctgcattagcaaatattttctaaaaaccctaacttacattgggctctaaatgaggaaggaaggagatgtaacaacagggataagtgggctggggccgagtacagtggctcatgcctgtagtctcagcactttgggaggctgatgtgggtggattacttgaacctatggggtggagagcagcttgggcaacatggcaaaaccctgtctccacaaaaaaatacaaaaattatccgggcttggtggagcatgccagcctcccagctacttgggaggttaaggtgggaggatcacctgagcccaggaagtcagagggtgccctgagccaagattgtgccactgcactccaggctgggtgacagagtgagaacttgtctcaaaaaaaaaaaacaaaaacaaaaacaaaaaacagaactaggaatggggttcagacaggagttgatgaatagatagatgtcagatttttaatagatagatgccagatttttgtgtgtgttgttgtttccatttcctcaaccagaacttttacatcagcctttacatccatgcacatgcagtccagtttgctttgtgcatttcataggagatgaaaccatggctcagagaggtgaaatgaatttcccaaggtcacataactagttaataaaagctagaatctaggtattttttcagtgaagtcttctattttacaagaaatggcaaagactacctcctcacacacttctccaagttttcaccattagtatgttgatttccataaaaggaatgttatgtactgctgttcccaaagctgcttgtcctgtctcctgatgctggtccttccttctgctgcatccaggtggcaccgccaccacgggacacctccaccatcattgctagtacaatgggagccccaaaccttggtttggtcacctcctaatccccttgttggtgagggaggaattaccaccttaggatctggggagtgtctggcactggacagatgatatttacagttcagtagctacatacactcacagtctggcaaaggaccacaacacataccatgcaggaccacccagtgcttgcccttaagaacagagtgaatgaccaaggtatgggagacaggctttgcagtaacaaaagggcaaggtgcccctgtttcttatgggagaaaatgattggcttatttaaataactccctgggctggcagggatctgaaatccactttcaggaataagcaggaactgcatgtggtccgtttgatgaatattgcttggctgggggacattatctgtgggagcagagtgaagagaggaacgtgtagttacgcctttttgaggtgctcctggtttcaccaaatgtcaaagaagcacgtaacactgaccctgaatttcaggccttatacaccagcccatctgtgttctcaccaaggggagaatgcctccctcccctgtgctttacagtttgttgaaggcttaccaaagcggagttttcagtataaacagttctttcacttttattttgttttactactcatagaatccctcttaacagggaagacatccaaattacagatacaaagctgtactcacaaaccccagacccctttggacactgggactttgtttctggtaagctcatctgtctgcctccctcagtcctttcccaggggtctcctcaagctctcaagcaaatagatccacggttggccctgcccaggagcctggccagttttcacagatttaacagactccagaagtggtcagggtctcaaattggcatctctgtcctactagcactgtgtattcaagagccagagcaaaccatgttaagagtcagggaaagtggcagctatttagtccccgcagctatttttgttcctgcagccccaggcatttctggttgaatgctgccactcacagcattcacacaagatctggaagctatttggagttcaaaggcacccacagactttagcaaagaaaagctggagtcagctcctggctggacaaaggatattaacatgtatgtctgtttaaggggcttagagggttctcggtagagtttctagatggaaagtcaccaaagaaaattcatgcctgcaacatttgctctgagcccaaactcagatgggtttggaataggattgggaagcacccttagcgaaattatgcagtgtccagagtgaaatccgtcaaaggtcaggaaatgagggtccctgtccaccctcttctcagcatgcaaatggcaaggactcctgattgctcaggatgcaaatgggatcccagaatgcatttaacccagagtctatttttgctccttggagcacacagcagactttatgtgatgctcagatttggagtttctgaaccaacaacaaaaagataatgctcaattctgcttcttatttagtaacttcccttctctttccttcctttcctttgtttttttctcctttatgttctgtcttcttaccacctcttattcatcctccctctccccttcctaccattagttcctcccacacacttttctccctcctcctttcttttctttctcccctccctcctcttctctcttacatttgatcctctcagagctgcactttggcagaggctggcacaagaccacttaatctagaatctcaccttcttgatcagagtccagtggtccttcataactgagagggaagagttcattcctctggtgttcatgagtctgagcactgagctcagataagttgctaacaactcatctctccactgagaagctggacagacttcaagagtgagacatggaggcagaaatcgctgggtagactccctggggcaggcgttaaggagagggagggcatggaacctggagagaatcagataacctgtgatctgatccttactttcctttttgtgagcttttgggtaggcaccttccctctccgcacctcagagttctagctgcaaaaataataatgctggactcaaacagccttaccagttccttaatttctgatcccttttgttttagcattgccataaaacttcaggctttatccccacgtaataaatgttatcctcttcgacgaatgaacaggcttataatgagagtggctttgacagaatttccaagcagagatagggaagcagatttgaccccaggactatggattgcagattccaccttgtcttcttcccagctgctgcagtctctggctcccaccccagtggcccctttcttactgacacaacccactggccccagaaaatgctgacctcctcctctctccagtgtgtctctgtgtgtgtgtgtctgtgtgtgtgtgtgtctgtgtgtgtgtgtgtgtgtgtgtgtgtgtgtgtgtgtgtgtgtgtgtgttttgggggaatcttccttttagaaactcagaagcaggtctggaggttaaaaaatgaatatttactaaaggcaatactacaaggggaaaaaaggtctttctgaattcaagcttccgaatatatttgggtgccaagcccagataaactctggatttaggttgtttgggggccaactgagtttccagatctgatgagatcttcagactgtcttggaagacttgcttcctccaatttttatggaagataaattccagtgttaccacaagacttctgacaatccccaaagctggcttatgggaatatgatcaatgtttacaaaagtagagtcatctattgaatgcggggcaatggtcaggggcccaccaaagatcaccctccttctgcagagaagagggtgatctttaccacagactctgcccacctagaccaaggttctggtcttagttccctctgtaggatacaaaatgaagaaaatatcagcctttctgttccatggccagtgaagtgtcaagggatggaaaacttaattcaggaattcatttggggaaagaatcactggcttgttgatttgttttcttgtcatccgactttgttttgtccctgttcataacagatcattcccattgccctgatatgagccagacctatgtgaggggtgtcagttatagccttggtccttgctccacttctgtggtgaggtgctgccaagagctgtggggaaaggagtggggctcagagctgatgcccatttgtagaaaaataaaataaaagttaaagcaaatgacttgggtgagaaaatggattgtgaggaaggagatcttagaagaaatgaatcaggatagaaaacagatgctgctcctgattcactaaattgtaaaatgacctggtctagtttcttctttctaatgtatttcaacttcaaattctttgattgatggtacctggagagcattggcaacagacgtctatgatgttcatacttctgtaactctttaaacattacactcttcataaattattacatgaagagattaatggagatatagcccttatccttgtgatacggtttggctctgtgtccccacccacatctcaccttgaattgtaataatccccacatatcaagagtgggaccaggtggagataattgaatcatttactgtattcattctcatgttttcatgcttctatgaagaaataaccaggactgggtaatttattttaaaaaaagaggtttaattgacttggagttccacatggttgtggaggcctcaggaaacttacaatcatggcagaaggcacctcttcacagactgtcatgagagagaattacagagcaaagaggagaaagccccttataaaaccatcagatctcataagaactcactcgctatcatgagaaggcatgggggaatggcctccatgatctaatatcatgattcaattatctccacctgatctcgcccttgacacataaggatttttataattcaagttgagagtttggtggagacacagagtcaaaccatatcattccaccactggcccctcctaaacctcatgtcctcacatttcaaaacacaaacatgccctcccaacagtcccccaaagtcttaactcattccagcactaacccaaaagtccaagtctagaatctaatctgagacaaggcaagtcctttccaactatgagcctataaaatcaaaagcaatttagctatttcctagataaatgggggtacaggcattgggtaaatacagacattctaaatgggagaaaatggccaaaacaaaggggccacaggtcccatgcaagtgcaaaatccaatagggcagtcattaaaacttaaagttccaaaatcatcttatttgattccatatctcacatctaggtcatgctgatgcaagaggtgggctcccacagccttgggcagctctgcctctgtggctttgtagggtacagcccccttcctggctgctttcacagctggcattgagtgtctgcagcttttccaggcacacagtgcaagctgttggtggatctaccattctggggtctggaggacaatggccctcttctcatagctctgccaggcagtgccccagtgggaactctgtttgtgggctccaaccccaacactttccttccacactgccctagcagagattctccctgagggctctgcccctgcagcaggcttctgcctagacatccaggtgtttccatacatcctttgaaatctaggtggaggttcccaaacctcaattcttgtcttctgcgtaccctcaggacaaacaccacgtggaagctgccaaggctagagacttgcaccctctgaagcaacagcctaagctgtacctgagccccttttagccacagctggaactgaagcagctgggacacagggtgccatgttctgaggctgcacagagcaggggtgccctgggccaggcccactaaaccatttttcccttctaggcctctgagactgtgatgggaggggctgctgtgaaggtctctgacatgccctggaaacattttccccattgtcttggtgactaacattcagctcctcattacttatgcaaatttctgcagctggcttaaatttctcaatttgtcttctctattgcatcatcaggctgcaaattttccaaacttttgtgctctccttcctcttgaatgctttgctgcttagaaatttcttccgccagatattgtaaatcatctctctcaagttcaaagtttcacagatctctagggcaggggcaaaatgccaccagtcctttgctaaagcatagaaagactcacctttgctccagttcccaagaagttcctaatttccatctgagaccacctcagcttggacttcattgttcataacactgtcagcattttggtcgagaccattcaacaagtctctaggaagttccaaacttttccacatcttcctgtcttcttctgagccctccaaactgtttttaaaaacagcctctgcctgttacccaattccaaagtcacttcctcattttcaggtatctttatagcagcaccccactctttgtggtaccaatttaccatcttagtttgttctcacactgctatgaataaagtcctgagactgggtaatttataagaaaaagaggtttaattggctcacagttctgaatggttggggaggcctcaggaaacttacgttcacagcagaaggcacttctctctcctgctgtcctgtgaagaggtgccttctgccatgactgtaagtttcctgaggcctccccagccatgcagaactgtgagtccatcacatctcttttctttataatttacccagtctcaggtatttcttcacagtagtgtgataatgaactaatacaccttttactatgcctacaaatgcttgggatagaacagaattggcctctcatttctccttcaaatgccttgtaataatcatgactgccccccagatctcttggacttatgtcaataaactttttttctttcacagtgaaaaaacaaggccaagtgactttttatgacttgatacactggggtagtattagaaatgagacactatcaaatgctgcaactttctgatacttgtcctactttgaaatgcaggaatgtggaagaatgttagatatacatgttctcattcagaacctccctttgtaaagtcctgccaatatcccagggtgcataatttacagtcaaaatggacactgaggtgagtgtagatactatgcttgggcagtaatatgtgcaagactgttaactgttaggaaaaccaataccagaacacctgagattccaggaagccccataaagctacatttctttaattgttcttgctgctatttgagtaatttcctgcctttgctgtcactcttcccattaagggtttattcttcaaagacaaggcctctgggaacatcaccctaccccttttgtggctcctccccattgtttcttgggccagatggtcagagctgactttactacagtgtgtgaaaatatcaggctataactctcctgttgagtaaggatgcgcctgcactcattactcagctcagctccggttgctgcagggatagtttcatcatcctctgcatttcaacttcctattccatgctatctaccaccccctccactaccctttcctgcctcttaagtgagaaatctctcttatgctctcccttcatcctcagctatcaaagacaaacaagagtctttctagatgaatctcaacttcgtaggctgtgtctctgcaagacagctctcctcaaaataaaataattcttgacttggaagtttctctgtgttatacccccaggatttccagacatagagttttcctttcacggcatagaccccaaggggaaaaaatcaaagaaatatacttccaagatgttctttctttcagtaattattctgccctttgcacttctgtcatcagacaatgtgtgaatttttgcctgcaatttctccaaatccttgtagtttttaacccgccacacaagtcattgaagtatttgaataacagtttccatttccatatgatcgtcaatataaatatgcatatatatataaaacctaattatttaaactaaaattgacacacatgtatagtttcttcttcctctgtccgttaaagaagacatactcatgtatatatctggggggatttactttaaaaattttttggttatttgaattataaaagtaaaaggtacatgttttaacaactcaaaagcataaaaggctctacaatcaaattaatggtcttatgtcttcctcctccagtcccacagtgggaggtatccagtgacttagtatacacaaatagatgaatacaagtaatgtttttactcaaaatttgaaaataccctaccttttattagtctttaactctgtttttcactaaatgatgtatcatgactatttttcttcattaatatatgaattttcacatttctgttgttttaaattacttgttttaagagtagataaactatgtaaagaatatctagccaggagcggtggcttgtgcctgcagttccagctactcaggaggccgaggtaggatggcttcaggccaaaagtttgagaacagcctgggcaacatagtgagactctaaaaaaattatccaaaaaaaattagtgggtgtggtggcacactcccatagtcctatctactcaggaggctgaggtgaaagaatcatttgatctcaggagattgaggtctacagtgggctatgattgcaccactgcactacagcctggacaacagagcaggattctgtttctaaaagtaaaaaaattaaagaaataaatgtatggtctaatgagtcgactagacaagggattgaaaaatttcctcttgcctggccagacgtggtggctcacgcctgtaattccatcactttggaaggctgaggcgggcagatcacgaggtcaggagatcgagaccatcctggctaacacggtgaaaccccgtctctactaaaaatacaaaaagttagccgggcttggtggcgggtgcctgtagtcccagctacttgggaggctgaggcaggagaatggtgcgaacccaggaggcggagcttgcagtgagccgagatcgcaccactgcactccagcctgggcgagagtgggagactctgtcttaaaaaaaaaaaaaaaaatttcctcttgccttccctccagttaatgctctgaaagagatttggacagtgtgctaaaggaagcacattccctctttatatttactgctaaccgtggattccaatattgagaggcaaagatccctctgcttgacttgtttaaccttgccttggctcatcccatactaaattctctatatcccaaatccagtttctctatagtggttatatcagacaaagtatttcaatggttttcaggtacatcacatactggggagtgaggagtttgggctcagagtatgctgagtttgtggttcagatcagtcacatcactgggagaaggaagccatttgggttaatttgggtctcaagaaacacaacctttggcatctgcataaattgaagccctttttagggaggcagctgggtatctgatggatttctaaaataagagttccattaacaaggttgctgtgttgtactgttatgttagcaattatcacagaggaagttagtctgggattaggaccagattttccaaagtgggacttgtaaacactatggaagtagactttcctgttggtgatagaaagattgacatttaacagcagccttttgtgcagcaccaacaggtctgattatcctgatatttgaccaagtgtgtaggttgattcgattatggtttagtggatgtcttgattttcagctcaccaagagctagctataacctgtgggtccaaaaatttaatttctaatatgtttgtgctgcactagcctatgcggtatttgtaggtgaggggaaggttctagattgtgttaactatttaaaattaaagaggaagatcataacacaggctagtcatggaaatcccagtcctgtcacctcaaataggctaaaagttctcatgaaaccaatttgtactttttattccagaagaatttatgctccacttcagaatttaaaaattaagcaatgggtgtattcactaaatattggaaataagagagtgcacacattatctttttccaaactcaaattgaatgaactaaaccttattgagttgaagaaatggtctcttagtttcaaacaggacctaatatctggaacagattaaaatggtaagaagcttaatgttgtttacttttgagccaacaaaataaaatattggtggaaaacaactctattacccagaagagagagaaatgggaaagatttccaattaggtcaactcccaaagaacgttttgaccttaccttattaacttatcctggaccacaaaaggagagctaaaagctgttaataacaatagttatcatgttagcattaatgaggtaaacttttgatgttattcggtgcattattaaagaaacgctcagatatcattttgtttcaagctggctgattatcttcaaaaccagatttaagacgtgctgagagagtttagcaatgtacaaaaatcgtctataattagtcagttctttcaaagtgttgtggaataaacttagagacacatggtgaaacataaggtttaatatggagcagagtctaatttgaagtcagtcttgatgcatgtgtaatgaaaattattcctaatggtactcacaaaccactgcaattaataataatatcaaaacccaatggacatgctcttttgctgggtgatgtaagtaataacatggactgctatttgtgatcacagtgaaactgggctccacaaaccgatgattatgttggcagcttatccttggagtctcttactgctgcaggaaacaagaaaagtggtgaggaaagactgagaaatgttttcattagcagtgagtctcatgaaagtctgtaactttctccaacaagatgacactaaaagacatctcagtgaccctggatattgtgatatagcagctcaaatattgaggtgggtatgaaccaacaaaataccaaaataaggtttccagaaaaatattaaacggatagtagatatgaataggaatgtgacatactttctataaatcctaatagtatagaaacctacaactgttttctagacttccctgcctgtgtcttcagcttttcagtttcgctccttcctctcaacctgtgaaaatgtttgtttttagagcttctgttaggataatttatttgtagagctattgcttttattctttcctatcatccttaaatgtctgaaagattagtatgcttttgttatatgtatttccttatctgtatatttttgaattggctaaaatctatgtttacaatgaagtctcttgctcaagtcaccaatgacttcctaatttccaaatgccaaaatcagtgagtgccctacatcctcatcctctttgatctctaatgtactaacaatatcatggcttctttgaaaaatcctcttttcctttgaattttggagaacttttccttttccttctgggtctcctcctatctctggttcccacccttttttatgtgggcttcccttcttcttccttagacgtcaacattccagtaggttccgtcctagctttctactcagccattaggaacaggctcactccttccatgggtttaacaaatactaatttccatcccatgattcccaaagttcaacgaccatttatacgttcaacattcatcgatcaacttttgtgtgataggcaatggagagataatgaacaggacagggtatctgacttatggacctcgaagttcagtgtggaaacagatacaaacagagggataaaggcagagacataaatggaattatgcttaaagaactacgtgaacacagaaaaacaccttcttttagcttccatctcccttttaatttcacatgtatatttccaacatctttaattgaatatttctcagtcgccacaaactcaatatgctgaagtgagaataatgagttcctccatcccacactcacccaatatcccaaacccacatcttgtactgtattccctatattggctaatacagtgataaaaacaatacatgcgcttgtctaagcttggagttctgtaatctttttcatccatttcttctttctcattctttacattcaaatagttatctcctaagtacctctcaaatctattttttcttttctccttttcatattttctatcctcttctcattttgatttctcttcttctctcctatgttgttcaatcttcttaatggcctctttgtcccccaaatcttcctcttcaactcaaattatctttagagttaacattttaaatgtcaggattgtttatgttgttatgttgactaggaagcccagctgtgactgctgtacttttagatgtctccatactttttgcagccaacgaggcccagggcatgtaagagaccctacaagtcatagcactttctatcttcttctgcattccctaggactgattctactttataaaactggacttccttttgggcatttctcatttattctcaatatttctgcataatatttagtatccccatagaactaagcccattcatgaaccccagatattttttccttattattctacctatcacatccattttgttcctctagccatgtagtcacctcaaaaatcctttgttgagctcctctgaggtaccatccattatactaggcaccggggatataaatgtgtatagaatcaactcctagccttagaagactcaggatctcatggggacaaaatgttcatttaaaaaaataatttcaatacttcacatgtaaagaattggtaaaacaggagaatgcaaaaatatacaaaattagagggactgtcattctgtgttttccaaattccctacaatgaccctttattacacttgtaattacaaaagtgatcaactcacaaaatgaaatctcaagatggcatgtggagtacttacaaaattctccatagaaattctttgggaatagaaaatatatgaacttaaagcggctactttttagccaaataaaataaaaattcaaagtgtaagtttctatgtagactttatctaataccgtatgttttaatacaaccattacatttgctccgtgagtgatacactggtatcactttctcactttgtatcacaagtaagaaagaacccaggaaggaagctgttcctcatttactcttagcctcatattgcccccttccctcttgctctgagccctcagcaacctagattctttctgtctttggaacctcctgtgtcccctctcgcctcagggccttcgcacatactgcagcttcctctatgtgacgctccgctgtcccaacacacacccatggctgtgaacttatgcatactttaggtcagctgttctcgtgtgtgtgtgtgtgtgtgtgtgtgtgtgtgtgtgaaaactggattgttccccggagaatacttggaaatgtctggagacatttttggttgtcacaataggttggtggtgttagtgtcatctagtgggtagagcacggggatgttgctaaatatctcccagtcctataggatggtcagcaacaacagaaaattattttgccttaaatgtcactacctctaaggtgagggaactctgttttaggccacaactcgggagatttctttgccaaaattagaactccttgtcaacctttctcaaagcacattgcttttcttcaaaggacctctctttgtaataatgtatcatttgagggtagagtccatgcctatgtagcttgccattttatcctcagtgcctagctcagagttaagtcaactgaaaatttgtttgaaggaagaaagaggaaaagcagggagaaggcaggcaaaggaaataagacaggaggagagacctgggctttctgagcccttcatctgttataaagttactgatataagtcacacatttttccctcatttgtaagtcaggaatgctaatccattctgtttccatgggttgggttatatgagaaataaatgtgcttcactctgtgatcaatcatagaaagcatgaagaatggtggtgaaaagcctctgatgcagcaatctgtgcagaggcagatctggagagaaaggggtagcatagcttcagtcaccgcagagaagaagcaacagcaacagtagcaacagtgctcaggagtgagatattcatagactggaaccacctgcacaccctggctgggatggccaaaaacatggcaggtaccatctataaagacaaggttaaaatctttaggcaggagaatagaaagctgatacaactatccaagaagaaagaagaagcacaaaacgaaaataagggttacaaacatacaaaacttcatataagcatttcagcttcaaaaagagcattaggagacaaggaaagagagaggcttctatgaggagagaactccgaaaggacttatttaaaggatgatgaccttgtaagaaggtggaaagcgtgtgattaacttgtattccagtatgggggaggtgagccgacctggtgagtctgttccttgtgagagaagcagtggagtgaggtcaggagagggaacttagaacacatcttccaaagaaccccatcatgggaagtagcagagcaggaaagagagccaaaaagttggcaaagaatgatgggcatgcaatgagatccactgtcctgtgacattcccatattttgcataaagtggttgaataacatgcctttcttatgaatgaatttcttgtggaaaagacagaggacagaatttcagatctgagtatggtgtgggatagacctgtggaagctgcagggacctgggagaagtggcagagagaggccaaagaataataaataaaattgtgggaggaggtttgcaggcattgctctcaggtcttgagcgtcaccctctgaagatctggggatgtaggcttactctgggataagggcagatattgagtgagaaattatgcagtggggagatggatgttcaattacattgcaacataatctgtagatataatatggaactttcagtgaactccagattgaaaaggaaactgaaactgcttttcttaaaattgatacataatattttacatatttatgcgggtacatgtgatatcttgttgcatccatagaatgtgtaatgatctttggtgaaaagggcctagaagtgttggaaataattttttaacaagctaagaagaaagaatctctttttttctttcaaacaacaaaatgtcataaagatatatatatatatatatatacacacatatatgctatataaacataaaatagctatataacctatttatatctgtatctatctatatatttatgtataataaacaaaattgttataaaaagaaagcacttccaagaaaaataaaatttacaattggaataagatgggagcaaatatttgacatataaggcaaaatataaaccatgccatgaaaggaatttaaacaaagagcccagggatttagggataaggagaggtcaactccagtttcaatatcaaaaaaggctctctgtaggagaagttttggagctgcctcataccttccgtcagaaattctatatagagacctcataaacctctctttaaaactccaaaggtgaagaagattagtgtatgtacagaaactattgttccaggagctacaagatgctacagtacattatctatttaatatttacaagaaacccataagatagatattttttaacctccattttacagatgaggaaactaaggtttaaataagttaattaacttggccaacttcttgccccagaaggcagcaaaagccgaaactggaatttaaacctctggatttctggccctacctcaaggggttccttcttaaggagcctcagcatttactaaagaagaattgggttagtagcaaactcaaatgaagtgggtgcagatcagtcatgatccccatgagaaacacagggcacaattagttaaataattgggagttgaataaaggaactccttataaagccataggcaacaatatcatgtcattgataagaaatgaatgacagagtaccctgggggctagtaacagcaagatgccactcaaccctaggctgaaggtgtaggggagggagtggtcaccaagacctgaggcagagagctgtgaggaaaggaccacctgaaggatgaaactgaaggatgcagccagccaacaatgaccctgcacggcgggagacatgggaataaatatcgtgacaccacattccactcaacaactgatctcttgctgtgctctccattggccaaacttgacttggctcagggcagatcttcaggaggctgcaaataaaaggaagaggaacatgggaaatagcatcacggtgccttggctgagaccattaggcttgatattgctatgattcctacatacaacaatgaacttccaaattgtcctgataggctgagtttttcaagttaaaggattatatctcatacgtctttctattcccaatttgaacatgaagcttagaatgttagcaggctgttaatacatgcttactaaattgacttgaattaataaaggaattttgccacctgagggttatcaatctaaaatgttttagaaatataatagtcatctggcaggcgatgcttccaaatttctcagatttccaggctcactgtaggactagaaactgaataaggagctgaaaaaatgtaattggataactaagagattttgtgagtggctctcaagaatgacctgtcatttgtagacagagttttttttgattcctcatgtcattccccggggaggagggactcagcattagtctctcagctttagggactcagcaaagaaggctgactcagcattaatgcatctattcacaatcactgaacatatgcagaagagcaaatatgatgctgtcaacacctcctcatggagcaacatggaagattccaacacagtgcatgttgctgtaaacagtccctccaagcaacgtgcagtgggcatggcgtgatgagctctcagacctccctctctactgcttaacgtttttcttcctgggaaacactcctaaccattctcacttttaatcacaagcagctatgcaatacaatttttaaagtgagggaattctagatccaaaggatccctaaatatatatatatttttgtatcttttcatcctgcagaagaggaaactgagacccaacataaacatctgtggaatgcctgactggataaaccctcacaggaccaacatgttgaagcccatcccaaggaaatgaagtgttcaaaaacctttgtcctccaaattgctccagctaatgaaaagtgttgtgctcaaccagagtcttactttttggaacctcagtttcctcatcttagaagataagcatcatagtaactttctcctaaggttatgatacaaatgagtgaatgggtataagttctataaactctaaaatgtaataaaattcattcagttatttactaataagtgaacaatattttctgacaggcttcctctatttgggatttgaagatcaggttctttcaaggattttgctcctaaatgttctctttctcctgcctcatttttaaaaaataaaccttttgttttagaatagttttagatttacaaaaaaaaaaaaaaaaggaagatgatacagaattcccaaataccccacatcctgcctcatcaatttttttctctctctgtatccctttgcaatctgtacacagacataagggagagtgccttccatcttaaaacagcagagaaatatctttttcctggacatttctcttcaattgatatccagtttcacccttccacttcacagcaaaactacttaaagaggtatttatctctattaatggtcttacctacttcacccccattatttccatcctccacttttgtccccatgactccactcatgcagaattgtcaaaatcctccgtgttgcctagaccaggggtcacttctgtgtctttgtcttattcaatgtctcatcagcattcatttcgatttatttcttcctccttcttagaagcctctctttccttggcttctgtgatcccacaaactcttatttcactggttgtctttctttaatgtcttttgcaatctatttcttctctgtgtgctctctgaatgtcaacctgcctctgggcacgtcagaaccttctttctccccctctttctattcaattcctagaagatctcatttcatttcatggcttctatccactttatatccaatgactcccacattgatatttccagtcgtcatctcaatttggaggactgaaattgtatcttcacctacagactttgtatctccacttggatgtctagtagttatgtcaagttttatacagtcaaaacagaactccctgtcactctctgctccagtctgacccttcctcagctgtacctctgtaaatggtactatccagtggtccaagctaaagagacagacattgtccttgattcttcattgtcttgattccctcaaaccttcacattcaatctaccagcatgtcccttcaaccttacttcaaacatattctcaacctgttcacattttttccatctccaacattccacttcactttacatcaccagccagcctgctgaaatggcctctgaagtggtttccttgcttgcattattacccgcttcctactttcactaaactcattctccacatggcggacagagtgatattaagttgttgaccatatcctgtcactttaaactattcagtggcttgatagtgcattcaaaataaatccaaactatcaaaaatctcttggccgccagggccctctctgcatgatctggcctcattttcttctctctctcagatcttatgtcctatcagtcttttcttgcacattagccactctggcctgctttatgttttgcaaatacaggaagattttttctaagagtttttctcttgccattctctcagcatagcacactcgactccacaagattattctatgatcagctctttactatctggttggagagacttttcttcactaccttttggaaagaaccttcttctcccctcccttcgttactcaccatttcatatccctgttttaattttttcattgcacatatcatggttttaaaccttgttcattttagagcagacatccatctgtcttattcactactttccctggggcctcaacactgctagtatacagtaaggtggttggtaggtacgtgaatgatgaaatgcataaatgtcttcagtgatagagatatagtagtaaacaaatctaaaggcttgtgatgactttcattatgttcacagcagggtacttttagtgaccatatgatatggtttggctgtgtccccacccaaatctcatcttgaattgtaactcccacaattcccacatgtcatgggaggaacgtagtgggaggtggttcaattatgggggtgggtctttcttgcactgttcttgtgatagtgaatgagtctcatgagatctgatggttttaaaaatgggagtctccttgcataagctctcttcttttgtctgccaccacatgagacgtgcctttcaccttctgccatgattgagagtcctcctcagctatgtgaaactgtaagtccattaaatctctttctattgtaaactgcccagtctcaggtatatctttatcagcggtgtgaaaatggactaaaacagtaaattggtaccagtagagtggggtgctgctgaaaagatacccaaaaatgtgaaagtgactttggaactgggtaacaggcagagcttggaacagtttggagagctcagaagaagacaggaaaatatggaaacctttggaacttcctagagacttgttgaagaatggctttgcccaaaatgctgatagcgatatagacagtaaagtccaggctgaggtggtctcagatggaaatgaggaacttgttggaaactggagcaaaggtgactcttattatattttagcaaagagactggcagcattttgccctgccctagagatttgtggaactttgaacttgagagagatggtttagggtacctggtggaagaagtttctaagcagcaaaccattcaagaggtgatgggtgctgttaaaggcattccgttttataagggaagcagagtataagagttcaggaaatttgcagcctgacaacatgatagaaaagaaaatcctattttctgaggagaaattcaagccagctgcagaaatttgcataagtaactggcagttgaatgttagtccccaagataatggggaaaatgtgtccagggtatatcagaggtcttcacagcggcccctcccatcacaggcctggaggcctaggaggaaaaagtggtttcatggactaggcccagggttcctgtgctgtgtgcaggctagggactttgtgccctgtgtcccagccacttcagctgtggctgaaagaggccaatatagagcttgggccatggcttcagagagtgcaagcctgaaacgttggcagcttctatgtggtgttgagcctggaagttcacagaagtcaagaattgaagtttgagaacctcttcccagatttcagaagatgtatggaaatgcctggatgtccaggcagaagtttgcagaacaggtgagatcctcacggagaacctctgctaatgcaatgcagaagggaaatatggggtggaagccccacacagagtctctactggggcactgcctagtggagctgtgagaagagggccaccgtcctccagatcaaagaattatagattaactgacagcttataccgtgtgcctgcaaaagctccagacactcagcaccagaccatgaaagcaaccaggagggaggctgtaccctgcaaagccacagggaaggagctgcccaagaccatgggaacccatgttttgcatcagcatgatctggatgtgagacatggagtcaaaggagattgttttggagctttaagatttgactgccccactggattttggacttgcatggggcctgtaacccctttgtttgggccaatttcttccatttggaagggctgtatttacccaatacctgtatctcccttatatctaggaagtaactacttgattttgattatataggctcacaggcagaaaggacttgccttgtctcagatgagacactagactgtggacttttgagttaatgctgaaatgagttaagaatttgggtgactgttaagaaggcatgattggttttgaaatgtgattacacgagatttaggaggggccaggggcagaatgatatggtttggctgtgtccccacccaaatgtcattttgtattgtgactcccacaattcccaggcattgtgggaggaacccagtgggaggtgattaaattacaggggcgggtctttcctgtgctgttctcctgatagtaaatgagtcatgagatccaatggttttaaaaatgggagtctccctgcacaagcttcttttgtctgctgccttgtgagacttgcctttcaccttccaccatgattgtgagccttccccagccacgtgaaactgtaagtccattaaatctctttcttttgtaaatttcccagtctcaggtatgtctttatcagcactgtgaaaacggactaatacactatagtttcaaaaacccacccatgcaggtatttccaaattgcctggccatgcaacctgaaaagaagaatgaattgaatgttaagagttttgtggttgattagtggatgggagggggtgactttcagataattaaaggctccctggataagactgatagcttttaaggatgtcaatactatttatctacttggcagtacagaggcatacagagttctatgctgggagcactgcttagtgcttctctcagattatctcattgaagcatctcaataatctcacaaagcatcttcccattttgtagataaaataactgagacagaggagagtcaagtaagttgcaaaaacttacaaaactggtcaatgacaaatcagagatttcaaagcctgttttcacgctattgcatatttcaattttgagaactaagacatattatccagattataatagcagacaggtgaactaataattgcagtccaggtgccaggaagtctagaattatccaagttacttctattttgggttgaatctaaagtgtcccagatattggcaagatgaaggatgttttgtgagaaacttaaatgattataaacaagggattaggaattaaaatgagcattcttcctcaccttattcaactgagagcctactatgtgccaggtaccagctggattctggggatatagtagcgacaagacagacacaatgtcctctggaagtttccttttgaagaaatgagggtacatttaatctttcacttataccatccactttcagttccttcatagcaattgggttcttaacagaaatgtggtatggtgtcagccaggaatttgtgaataagcttgctccagaggtctctatggagatgctacttgatgcagagcatcagcgatggaatcaaatggtaccattcccagccacgccatcattggttcagcttgtgagtgtggttttctttagttagttaagcttgacaaatattcacttatagtgaagaaaatcttcctgatacactgtaaatttattgcatgagttttggaaatgtttaggaattggtattgacagtctttggtgattgcatggatatgaaggggatgaagaaatggaagagtcaaggataatttccaggctttgggtttgagcaatggggtgattggcagtgccatttactaagaggaaatacactggaaaagaaacaaaatgttttgtttttgctttattttgtctcatttaggaaaaagatcatgacgtctgtttcagatatgttgagatagagctgtctatagacattcaagcgatgttcaataggcaactgaatacaggatggaatttcaaaagagatttagtgaaaatgtcgggaaattgtcaataaataataacagtcacaaagctggaaaaacgtgtcttttgagaagtgtaccatggaattcagtaatctatacagagggagtagtttttgctatttaggcaaggcatttttcattttgtggcttttttttcttttttgcctttaacattcaagtttcttcccttgggggaaaaattcaaccagaaaaaaaagcaaagcaaacaaaaacaaaaacctgatactaccttccttataatattgcttttaaacaagcttatcttgctgagtcctttcagcatcaagtcaaataatcatttcccccaagggaagaaggcaagcatggaaattaaattaaattctaacaaaacaagccaatgtatttcccctccacttatgtgcaatctgtttcatcccagttgtgactgatgcctcggataaaacagccatgcatctgtgactgatttacacagtgttatgcaacacacactctgttatgatgaaaactcttgttttctttgaattttgtgttgtttaaaagggagctttttcagttctgcttttgcttgagaaaaatggtaggatgcacgtggattttgagacaaaaggtctagctttatctcccagctctgcaggtttccactgaacaattttagtccattctttcagaaatgaggtaacaattgcctttagggggttctgagactcacacatgcccagtgaaggagggagctcatggcagatacagttagttgcctgcccagtgtctatgccccccctcttttttccattagaaccccagttttcttcaggaccctaataggcccaactctgaatttgagtttgcctctttgttggttaaaaatgctcaaatattggttatttcaagtggttcattctcaaacaaatatctctttcttgcctttcttgcagcttatggtggcacagggttcttctggtcaatgaggtattagaggggggatgtatggaggtggccttttctaaataaaaaagtgaagcccattttatcattccaggatatggacatgatgcctggaggaacaactgacatatttcaactgtgagaatgaaaatcatgcaatagagatgtggaacagaaagctagaagaataattcactcaacaaataaaactttttactaatttaagccacagattagtttaggttttctgttgcttgtagctgactgaaatactttctgatactgtattcacaaactgttagtttattttcacctcctcctttgataatcatcccactttttaaaattccaagatgagtaggggcctgaggcacggcttcctctatcattattggagcaagttcaagctactagacttactagtagttctcagtctgcagaagatatttgatgagatggcctcgtcctcagaacaatcactattgttttttgagcacacacaatgtgccaggcatcatgctaagccctttgcatacaagatctcatttaattcctgacaacaaggctataggaaaataacacaaatcagtacccaccttttgtagtaaaggaaaatcaggaagagagtttaagtaacttgttcaaaccaaccagcttctaacaggctaaaacgtgtagcattcacatgtctttctagctgctgtgtcataatgttttggttcatccattgtgctatgaccagtccaactaccaattttcttctttgcacagctgtttatttcattcttctattctgcctttctccataaccgtgctgtcaaatagaactttctgtcatgagagcaatgctctatatttgcccacttcaaatatagtagctactagccacatgtggttattgaggacttgaaatataaataatgcaactaaggaattacattttaattttgtttaattgtaagtggtttaaattgaatagtcacatgtgacaaatagctgccatgttgaacagtgccactttagaagaccacaaccagatgctgccctggccagggcaagccaggcattaggtgcctgctcccagctactctgcccttgacagtcctgatattttccaggagtagtggctgtcctccacagccctttcttgtggagctgactagaggggatcaagcctttcagcaacattcatacctttcttcaaactcagcactataaacatgacagcatctggcttccctgtgtcatgggcaacccttggaacagaggtaaaatatcaaagtcactgtgaaatgatgataataaatgtgtgacatttttatgggttacaaaaggttatgagaccatcagtttttgaggtgaatgatttatctagagaatgtgaatatttaaaaggcacagggataggaaataaaaaccaaatgaaaagtataaaatcccataacacttttacctttcaaagctggaatatcacccataattttcctacttgcaacctggatattaacctcacttttatttcataattgagttctggatggtttctgacactaccagttaggtccctgcatcaggaagcaattgatctactcagtagaatttcttaagaaaactgtttgtgtatagtcaagtagttgggacagacacatggctatttacaaacttccttctagtgatcaagttgtgtagtgtctcagggcagaaatggtgattactcttttagttccctaactggagacaggggattagaactgttagatgtagggaaatagcaagagcatgatgtaagggtttaggaaacctggatttccactaagttgctgttactttgggaaagtcatttaacctctctcaacgtgtttcatcatataaaagtcgaaataattaagacggttgttccatcttccaaagtttgaattttaaggtgctggtgcaccttgagatagaagcaacacggtgcttggggtgagccgaggaatattgagagattccagaaattgttgcagtggctcgaatcaatcccctaagatgaggaaacggaggaggacgatcttgagggcttctataacaataagtcagtggtgaagatttggaaagagacaactaagccacaagagcagtggtgcaactatagaagttcgcatccatggattcctgaaatttcttcttgtctgacgttgacaaggggtgtattgtcaaagagaatgtttaaagaaaagagaagaacaagcacactgaaaaaaagtgtggaggagaacagggaagggaaagatcccagaagagaggaacaaaagaagtgaggtcgcagaggacaactctaagaaaaagaaaatttgacttgctattatctgccataagtatcttttatcatagttctggacatacactagttctggccacagtcttcacctgtctggatgattgcaataaagtcctaatttttgcctctgcttttgatcttgcctccttcatggcattctgcatatgcagctaaagtgattgtcctaacacacaaatctgatggccacatcactctcttgcttaaactccttcgtcagccttcccagtgctcctcagaataaagttgaatgaccatcatgatctgactgtgtcatatccctctagcagtggttgactaatgttttctgtaaaagcccaaccagtaaacattttctgctctgaaggccaaatggtctgtgtggcaactacccaactctgctgtcacagcgagaaagcagcttaggcaatatgtaaacgaatgagtatggctgtgttccaacaaaactttacttacaaaaactgggaccctcctgcaggcccaggccttagtttactgactcctgccccatagtctcaaaatcaactccctcacccaatgccttaaatccctgtacccaagacccatggaatgacttgcaattccctaaccatgctctgctctctctcaatattgtacttttgcacataatcttccctcagtctaggtcaacttccacctaactcgttgtccagttaacctccagttattttgtgattccacttgaacttccttcaccaatctcacttgaacctgtattctcacttatcacactggtagacaatttacctgtttgcatatgtctctcatacctcactataccataggctattggagagacgataccatatgttactcatttctgtaatagccccagtgtccctggcaatgaatggacaataaattctatttatcactgtaagcacttaatactcaaggtctgtatgtcttgctctattgcctagctacagaatgaacacatgccactgactggtgagtaattgagtttagaaaattagaggccatatctttaacagttccagtttctagaagtaaagagtttgatataaagctccagaaagaagaaactgaacttaatttggagcacattttaggagaaaagagggtaaaggcactgacaacatcatctgactttatgaaagactatgggtcacttaaagagatattgtgaggaatgcacatagtaaatttagcagacagatttgaaatttggatggacaacaaatgagcggtagcactgtgacaaggagaggatgcacctgccatgtcattttcattagaaacagagaacagttttagctggaagagctgacagccaaatgcatgccaagtaaataatctgcatagggggtgtaagaatgcaaaaacatttccgacacaaagaacaaggccttggcagagttttctgtgaaaagagattgtgaataagcctccacgaatgtgaaaatcacccaaaaggttgccctaagaagaggaggagcaatactaacattttgttgggtgactactgtgccaagtactatcttaccacgaataatcctcacaaaaactcttgaagcatgttacaattttatgggggataaaaatgaggctcaaagggcttaagcaacttctatagagccacaaatctccattctttccagtacagtagcagatgcagcacaaccagtgtctagtgtccaagaaagggaaatgaaaagaactaaggtagtaaagcctggccaactgagtgtagcgtgtctacctggatttgcaaaagaaagacaggagactaaaatctcatattgggcacctacatttttatgtttaccggcattcagtccccttcctgttcattccccttcctgacggcactccaatttcctgttggagaatcacccaagccattttgtttaatctcgttggggttgtaaatataaaaggctgcccctttcttttctgtatgggagtttaagggatgcctggaggctatttctaccagatcttttctaaaatctccctgatacctaggcttgggcaatcacactccatctcttaggactttaaatattaagtggatagacataggctaaggaaatggctggagttcattccagcagcatttcgaagattgatagttcctatcatattttaagcctatttgtccagcttctccactgattctctgactcctcaattatctcccagtaaatctccattttgggccagcgttgttttctattgctgacaatgaaggatgtaacttgttgccttgttacccaaaacaaacaaacaaacaaacaaacaaaaataacagaattaatgatacacattcagcactaagatatatgctttgtaaaaattcatcaaactgtatataaaagatttgtgctctttattgtatgttgtaattcaattaaaatgtttacaaacctacttctcaattacaaaaacagtagatggtttccttagaaataacaagggaaaaatgaaaacatatgccatactatgaggcagaaaactaggtaaacagcaagacaactaaaaaaataagcaaatgtaacaggaataagatcaaataaatcaattatgacagtaatgtagacaggattatcttttttttactaaaatcttacacccttgcattgggctgaaaaatcacaataaactttatgccatcttcaggcaatacaaggaaaacaacgcaaaacagaaatgtcatgcattaaaggtgtgaaaggatattgtaagcaaacattaattagagggataactcttaatatcaaaaatatacatattagacaaagatgataatgaaggtgcaatagctttgaaatgttaggcaacaaataatatcactctacctgtctttctctcttttgctttctcaaaaaaagagaaatatttcaggtatacaaacataacatacagccacgttctcaccaactagtttacagaattaaaaaatatggttatttccacaaattaatctcctcagtagttaccaaactaaattttctaaccctactagcctctaaagagcatttgctgggacactttggcaattgatgggccattgtagtgaattgtgtgaattatttttactgatgattcattcaataccaccattgtttctttttagataccacacctctgtcaaactaacttattacttataaccatcttcaaaattgtggttagaggggattgctttatcttctataatttccattagcaatcccctcccccttcatatacctgaaaccgattcttcattttgaggaattatctcaaatttgtgagatggtgctatgcaaactcaggatcaaacactccctaccaacctgattgctgcccccaaggacccccagatagaaattccgaagccaaccctgcttctaaagaatgaatttttaaaaactttttattattgaatattttacacatatattaaaataaagacagtagtataatgaccttccttgaacctagttttaatcattattcttggccaatctttcacctgtacttccctttgctttctcctcttcagattattttgaagcaagttctaaatatcgtattatatcatagaacttttaaatatttcaatatacaactctaaaaggctaggaaataaaaattaattttccaggttgttttttgacttctccataaaataagagaacaggtctatttttattcaccattgtatctttagttcttatatagtgtctagaatattctgaataaatattcttaaatgaatacgtaagtgaatcaagagagggttacttatgtaaattaatactgggctgcttctctgcttgggtcataaaaaagattgtgcttagaaataataacaaagtatagttataaatattttaggaaaaaaaattttttaaagggtatattgtacctaacatggcagaaataatgagacctataatataactatgaaaaaaaattactccagaaagtaaagtaataaataccatagtaggaagagaaatgggagaaaccaaaacaaaggcagattttgtaggatgagcttgtaagacattggtaagaaatgtttgtggaaatttgactaatttggcaatcagaagacaatattaactaagaagctatatttagcatgtatatgtcatttattaatgacagtgacaaggatgaatgattgaatagatgtgaacattgtcataaaactattaaggactatatttaagtttcaataactaagctttttttttttttttttttgagatggagttttgctcttgttgcccaggctggagtgcaatggcgtgatccctgcacactgcaacctctgcctcccaggttcaagtgattctcctgcctcagcctctggagtagctggaattacaggcatgtgccaccatgcccgctaattgtttgtatttttagtagagacagggttcctttatgttggtcaggctggtcttgaactccttacctcaagtgatccacccgccttggcctctcaaagtgctgggattacaggcatgagccatcatgcccagcctaagctttttttttagttcccccaaattcacaagggatccagagttggaagatatttctgacctcaggagttcaacttgaagtcaaaacttagatgaaacgaaaaaaattgcctgtggtattgattatttgtgcaccagaaactgtatgaatgtgccagatgccttccacttgctccttgagaccctctctccactctccactcacccttttctctgtcccagggcgttggcttgcaggaacccctctggctcctgatgggtatagtcagcggggcatgctctcaggagatgagagggagggaagagaatgaggcccaggtgtttatttccccacttccatccttgcaggttgctttaccctggctgctgctcctctcacgttggtcctctacagattgatctcctattaggattccctaaatctctctgtattagtctgttttcatgttgctgataaagacatacccaagactaggcagtttataaagaaaaagaggtttaatggactcacagttccacgtggctggggagacctcacaatcatggcagaagggtacctcttacacggtggcagacaagagaatgacagccaagtgaaaggggaaactcctcacaaaattatcagatctcgtgagacttattcactacaatgagaacagtatgggggaaccgtccccatgactcaattgtctcctactgggtccctcccacaacacgtggaaattatgggagctacaattcaagatgagatttgggtggggacacagccaaaccacatcattcgccttcctcatatctttgagccctgagtgataacacatcttcgtcttccgttattatccctgaggaagctcactgatagctttgatgataattcctttatagactaccctcaaattatcctatttttttctttttaacttttactttagattcagggggtacatgtacgggtaaattattctaatatgagtgtgtgtctgtctctccctgggtctctcactgagaagcactggcaggtatcatatttttaatcatattggcatttctactgctcctaggcaggtacttttgcaccagcctatagttacaactccttgagaacccatgtttctttcaccttgttgcctaaaacctgctaataagaaatagaaaatcaaattgacagggataaaggtgataagagttggcaaggaggaagcccaattgcataaagagaaatcatgtggaaattaaaaacaaaacataataataatccaggggtctgggagttgaaaagggaagttttatgtaattctagccagttgatgtcattatagctagttctctggccagggaggccaggggaagggaggatgtgaaggtgagaaggactcagacattctcctttagatctgaggctcagccttatgtgtgcaacattaggtcagtgagaacaaagggatgtgtctgagcaacagccaaggccatttccctgcagaaatggttccgcagtcccaaagatgggcccactatgagttaaacctcttgtcatccgttttgtgtctccccctcccttagcctgtcttgctgtggcctcccaagcccatccatgcaatggcaacgcctcgcaggcttccagctcatctgtgttcaggaatgggagggtcggggccactgacacacaccagtatcctgcagcctattatttcctgcctgtcctggctcccctccaagactaaacatgacaggtggatgaagttcacgagaaagcactgcaatgggccacttttccaggaatgctgctgctaactggattcacaaactaagccaactcccaccaccctaggctgaatgaggaggcagctgaatggtgcagaattgatttttttttccttgcttttttaccctctgtctccagtctaaatcctgtgattgttccagctggtataagcgactccctactcagactccagggttctaagtgcttccaaggcctatgcaagaaacaaagacacttaactcatggctcttatttccaaaccaatgacccacaactgagaaccggaggggaaaacaatctgtgccattgtggagcgtgggggtgagggtttgtgatggcttcagtctgctctagcaagaaaagtctcagagttatttgataatctgattgtggaaggagaagatagaaaaaagcaaaaaataaaataataaaaaaggtcacaattggcactcttaattggcaatccagaaagatttagagagccagattacgtttagagaggtaaattatctcatttgaacagagtttggagattgtaaaagtggctgatcatccaatatacttgtgactcttttttttttttttcaagtaaaactgtgagctaatagggcaaataaccatgcagaggcttcttgtccactccctatgctgagggaatgacagttgctctctttccaattctgggtaaacaatgccagattaggatgggtctgaccccagattttaaggtagtaagcctgctaatggaactgacagtcagaaaggtgactgggtaaaactacaacctgtgggctagggtcaacatctatttatcttgggctctcattgggtactaaataattaccacctcctactactatgagctcaggcactaactgagtaggcattttcagaagtccttagaaagttcccaagaatcagaatggctcctgtgggagctagttttagacttcacagatatcttagagatctgggggggaagttatttaggatagatgtatgtattccaaggacccggctagtatctaaatagcttacttttgttgttacctccatggttaaatatcaaatatgtctccccatgctatagcattagtgaaaaggaatgaaccagaagagccaaccatcttccaccccaaaccacttccaccccatccacaggtggaaatggggcggtaacttggatttaaggctaataaactctcttactttctctggacaagatttaaaaggatgagcacagggactgactcagctgtgcatatgtaaaatacctgcctcttggtaataaggtacttgaagattatgttttatataggaaaatgtttcacttttaaacaaggatctagattacatttttgaactattgatgtttattcttgaaaggaggggagtatttatgtatgtgcatacacctgtgtgtacctttgaaacaatatttatttgcttagaaactaggaaaaaagataaagaatatctgaatgtcacattgctaaggatttatcaaaagggacaacagagtcccaaagtccaccctgggatgttattggatcttattgaaatctgaaagtccacccttgactgccttgccaaggtccctgtcatgtcccctattttccctttccctccctgaggtattattccaaaaggaatagatgaggctttgtaaaattactgtaagttattgtgttgtagtaattatgctgttgtgattggaacggagatgaaaatgaatcctatctctgaggagagtggaagattgtattagtccattcttgcattgctagaaagaactaccggaggctgagtaatttatgaataaaagaggtttaattggttcacaattccacaggttatacaggaggcatggctggggaggcctcaggaaacttaaaatcatggcagaaggcaaaggggaagcaagcacgtcctacatggctggagcaggaggaagacagaaaagggggaggtgctacacacttttaaacaaccagctctcatgagaactcacttactttacaaaaacagcaagtgggaagtccacccccagggaggggctttccaccaggtctctcctccaacactggggattacaatttgacatgagatttaggcagggacagaaatccaaaccatatcaaagatcccaaaggattaaggttatttgcaatgtaaagatttaatacaaaagccaaaagcatcactcagaggaaaggccagtcttaggacagaagagtcaggctagctagagagtagagattatgcccacaaggggcttcctctgtgatggttttaaattatcttggtcccttgctttgctctacaaaacagtcgtatttatttctcctttgtaagtcctgtcttattatgaggggaattataaggctgatttctcctttgtgattccccttttattaaaaaaatgctttggtaaaatttaaagacttttgggaatggcattttaggaatcagagcttttctgtgtttctcttcattgactgagatccttgttttcttaatagcatcatcttaagaagaagagtagtccaggcattcttgatgtgagtaagtctgaaacaaaagatcttttccaaaaacacaccagaggtgagaggtgaagccagctgggcttctggttcaggtggggacttggagaacttctgtgtctagctaaaggattgtaaatgcaccaatcagcattctgtgtctagctaaaggattgtaaacacaccaatcagcactctgtaaaatggaccaatcagcactctgtaaaatggaccaatcggcacgctgtaaaatggaccaatgagtgttctgtaaaatggaacaatcagcaggatgtgggcagggccaaataagggaacaaaagctggccaccggagccagcagctgcaacccgcttgggttctgttctgtggtgtgggaggtttgtttattccctcttcacaataaatcttgctgctgctcgctctctgagtctgcactatgtttatgatgtgtaacactcactgcaaaggtctgtggcttcattcctgaagtcagcgagaccaggaacccaccgggaagaagaaactctggacacatctgaacatgtgaaggaacaaactctgggcacaccatctttaagaactgtaacactcatcgcgacggtctgcagattgattcttgaagtaagtgagaccaagaacccacgggaaggaatgaattctggacacagagggagagcatgtttgaaaagaattggatatttggatacaggagggattacaagagaaaaaagaaaaaatctcatgactctgcaactcctaaggaaattctaatgtactcaaaggcataaagcatacagtcatcaacttttctaactgaagggatcatttgcccaccctgccttgccccaatttgctttgtgtattgtacccctatgtttaagaatggggtacaatcccatccacccagtccaagccaggaacatgggtaccatgtttgattggttccttttcctcatgtcccacccacccacacaaataatcagtctcaaagccccattggttttatcctcccagatacttgtaatcttttcatttgatatgtctacaaagacatgggagaagataagagaatgaggaagccactggattttgcaaccagaagagctttacagactgatgagggagccatttcaatagccagattacaaggggtcaagccagtatgggtaagaagagaagaatatggccattgtatctgacgaatactctggagcaatgttattcattcagtatatgctcaacacttttcaaaagtctaaattatgttttccctaaagaaatgaacatgctctcttcttattccactgctttatttcacaatttctttttccttcttaaaaattttaccttctgttaagtataaaaatttagtaaataataatttatagaaatgttagcctttcttactgtgagagtctgggtagaaaatccttgaccattactccaaatgaatttttgctctaatgtcaatctaattcatttactgtctaagtaaagtatactctcttttggctatgcaacaattcaatcaccataccttcctattttggggagaatccccctgttatgttatttttggtgggaggtggtgtcaaatgctccatctctcccctccctgcttccatggtaggagcattgacttaggcttagccagtcagatgctctcttcccagtgttatgaaaactgagtgaatgatgcaaagacaaaatgaaagttggaattcattgaaagctgtggccatggggctggctgggtcctctggcagttgcagtagcagtagcatctggctagattcttttggttacaagtctgttgtgcttcctgacactgggcctttggaaatacctttgcttccaacttcttctaagcctggtcctctagctttctgatggttctgtaagccattgctattattccagtacattctcattgttcttcttacagatggagatggtttctgttgctttcaaccccaggaatcctaacttgtatatttccaaatatgtcttgttgtttccaccactgtgctttttccatgccaatggtgcatctagatcgcccttctcacttctctgtttttccatatccagctcaaatttcatctttcttgatcatcataacattttctgagtccactctatgaaccaggtcttgggctaggagacaaaaaagatatagccactgtactcatgaagatgttatgtatagtgaatggcacacatgtaaagaacagtcacatttcaaagagttaagagccagcttggaggtatgcactaggcacgttacagtgctgaagcaaaacttcttacttctggtaagcttccatagagagggagcctaccaggcattgaactcagggaagggcaatgaaggcacaaggtaggcatgagccatgaagtgtcaaaaaaaaaaaaaaaaaaaaaaaccttagacaaattaaatttaacagaggttaattgagcaaaggacactgcatgaatcagcttcccaaaccagaataggttcagaaagactccaacacagccaaagtggtggaagaaggcttatggcagaaaaaggaaaatgatgtacagaaaacagaagtgagatacagaaacagccagattggttacagctcatcatttgtcttattgcaacatagtttgaacagttggctgccgaaacttggtgattgatactagagtaggttacagtctgtttacacatccagttaggtgactattcactgtgtatggacaaacctttaagctgaacttaaaatatgtaaggaggcagttttaggataaacttaatttaacagaggtgggaaaggacatggcaatgctgaggaatggctgaggttcagtgtgactacaacatgaggtgtgaggggaaggagggtagtgagagataaagccggggaagtggattccctatgtgacaaattgaaggatgtggacccatcctctaagccacagacaccaaaatgttttgctggtgcatcccatcaacaaagtgctttgagcttccccctaaatatatgtacgcttacttataaattttatatagtgctatgatcgatccatatatgatgtattaataatatttcatattgaagtagaaaagtaacactaaatgaaaggctaatatagtctttccacactcaaaaggattgtcttgcttagccttaatctgttgtgttagaagagtttattggagggcaatggtctattcgcatttttataggataactctgccagcagcatggaaggactggagcagaattcttgtaaaattaggtgaatctagattgctttaaaaataaagagccatagtccccaataagttagtggaactgaggaatgatcatcaataactactcatattacaaaaagacaaccagatgcgtagtgcccccagatggaagcatttgaaacttcataccacctatattcttgccaaaaacatcaactctgaatctaatgaaaactttacaattaatgaataataagaaaattgttattagctattatatactataataaaataaaatatatagcggaatacaaagttaattttttataaattattatataaactaaaggaaacattgggttaaaggacatgttaaatgataccacaaggatataaccagcaaaatgcaaactgcaggaagttctatgggacaaacaacccagtttctgcaacaaataagaagcaagggggagaaaagagtgatggagggtgatatggtttgatctgtgttcccacccaaaactcatctcaaattgtaatgtgcataatccccacatgtcgagggagggaccaggtgggaggtgattggatcgtggggacggttcctgctatgctgttctcatgatagtgagtgagtgctcatgagatctgatggttttataagcatctggcatttcccttgcttgcactccttctctctcctgctgccatctgaagaaggtccttgcttcccctttgccttcagccatggttgtaagtttcctgaggcttccccagccatgcagaactgtgagtcaattcaacctctttgtttataaattgcccagtctcaggtagtatgtttatttatagcagtgtgaagatgactaatacagaagagcaaacaaaagaggcaagagatgcatcagcagttgcaatgcaggacagttatttggtttttgatgcaaaaaatggtgagacaacataagaaatttgaacactgactagatatttgatataaagggaatattgttaatttgttaaggtatgatcatggtttttagatttttaagtttttatcattcagaaatacatgctgaaatatttacagatgaaatgatatctgggacttgccacagaataatcacggatgggatattaatcaaataagattgggcataatttgatagttattaaagatgggtgatagatacatgtagtccattgtatttttctctttgttttggaatatgcttcaaattttcctagaaaaaggtattttaaattccgatgttttggtttcatctcctagaaattctgataccatagacctaaggtagtgcttagaaatccggatttttaacaagcactcaagggaattcagaatcagatggccactaagaccacaatgtgagaaaattagactagacagtgcaatgacttaaatggaggaaatcaagtaggagaagttgacagtgtctttcatggggtaagtgttcatgataaatatctgccaattttgtttgctgattatttataaatattcatcctagatcttaatagtgtttgtgtataataatcatttagggtgcaattaccagtgctatttcctgacttgggccttttttttttcctattagatttttaagagtcctttaatgcttgccacatgaaccaaggctaattccctgattagataattatcctcgtgaatgctttcttcataatcacaatggcaggagagatgttgccaggtctttcaggaagggagagacacccagttgtgacccaataaattggcatcagctcttactccaccccttccggtaggaaaggatttaaaaccttgggaaggggagggagccgagaggtgacccatctctcccaatgctgtcaggtcacatcacaaggtactcactccccacccttttttctttccacattggagaccttttcaactggaaatcgtgctcagctcaggggctgaggtgtgtaatgaagacagagctgaccgtgttataacgtaaacaaaataaaaactggaaacttttgtcatagctcctcagaacttgggtccctctccagccgttaactgcaggtggcccttccagcaaagtaacacaaaatgctgctgctggctgagcctctctggaattgcaaacatgctttctaagctcagctctgccgtgctgccagcagacggtcttccagaggaatctccttatcatgagggattctgggcttcagacccatctgggatcagctcagctcagggtaggtagttgcagtggctgcatcccaccccactgtaacacaccgtgagctgcaatggccttacctctcctgcataatgcggggaaacctcattatgccccattgataaggtaatgaaataacaacagccagagatgggcactgttcacatcctgattttatagacaaagaccttgaggtttaaggtctcagtgactcctccagggtcactcagctcagagtcagagccaggatcttgataatcttgctccagattttgtgcatttaaccccatcagaggttattttatttgccttgatgcaatcaacttgtcttctaagtcctattctcctcctctgccctaaagataacctactctttctctaacaggaactgcatgtgtttccctgaacctgttctacctgttcttatatacttcctttttctttagccttttcttcttcttgaagaaattttctttctcttaatcccaattttaccaactgaaattctgccccagcttcaaggcccatgtcagatgctatttcttccaagaagtctttcattcctccactctcatctataagaaacatttctccactttgcatcttcatcacattctgctgataacatttttttgtcactcagtttgtttccttttcttggatttagttgttgttgttgcattatggccgtgtttgtatttgccttacgatgtctgttatgttgcaaactccctgagcccagtgaccatttatttttattttttattttttttgcttttcttattcatatggtctagctttgaccagtgaccatttattactcaactttttatttcccccagggtttacaacagtgctttgcatatactatgagcttaaaaatacctattgggttgaatgtatgcaatactgaaacacgtataacttagtttgcatttatgagaatataattgaatgcactggggaagttaggtgctgcaaatgagtaaccctgtgattcatctttatggaattaaaacaaaaaaactctttaaacatgataatttatatctttgctaaatctgtatttgcatttattaaaaaattggaaataaatggccactgtgttttcaatgttttgctttcacttctccccattacatagatgagacagagctgcagagctgcctagaaagtgaatgtatttggatgctcactcccaaccttccttgcccttttgtgattccggattggattgagtgtgtgaggagggaaagagcagctctctggggagattaataatatggtctgaaggatgaagatcaaagagaaaccttggctgtagaccacgcagtgaccgtagtaaccggcagaggctctctgatctccgtgctcctcggtaccccctgtaatctcacgctgcattttgcaccctttcctggggtcagcactcatctcagttacacatctccactccacccttgcttctccaaagctccacctcctgcaagactacagatctgctgtttattcttgtataacccattgtccagtcatcagagtaccaccaaaaagaggttaacaaaactgatatgaacccgatgaaaatttaggggaaatttgtttatgaaaattcaggggaaatttgtttaaacatttttttaaaaaagtactgtttaaaaagtaaaaatacttaaaaaatacctaattggtctcctgtagacaatatctaacttcactaattaaactacagccaatcataagccttataaaagtttgattgtaaatcatctgttgcatgttgtctgggatatgctacaaaataatctggtggtaggtgggagttgagaattgttgaaaccaaagatagttccttggggttcattacactattctctcttgctttagtataggttcttaactttttcttaataagttcttttctttaaaaaaattggttttgttttcaaattctgtcaccaaaattgcagtgtggttaatttttctgttttggaatatgggaatcacttagttgagttctctgccccttctgccttcttcattttctcaacttctatccttgcctttctttacctaacttggtgaaacagggctctacctgcttggtgaatctcaattactgtccacagaatggcccaagaactttggatattgccagactgaatgctcagactcctttcgtaaccatttaaaaatattccatggtagcaggagctccaagctcgagggttttattttcactgggaacttcaaataccgccgctgggctgcaaatagaaactaggatggtggcttgtttccgaaagtcacagtgtttgttccttttctcttttctctttccttctctctctctcttttttcctctgttggaaaagcatctattggagagcgattagcaattcgggggtacaagaactctctggtgttaaatatttcccaggacttcaatagcaaagctctttggactgctatgaatgacatagtaaattgccaccctttgtcctcattttggagacgtgtaccatactgttggtctgggaggagaacaagctcctaaaccaaacataagaccctagggaaaaaggtgacacacacgttgtacctcgcaggtgttttggcaccagcaagtcaaacagggcatttattaaatcagatgagcagacagacttgccatttgatccacagcagagcttgttctgtacaaaccaagtccaaaatattattccattcagtgggcagctctttgcaacaccactcgttggcacgcatcccttgaaagctgctcttggaaacctctgaggttttgcctttctctaatgtttgtctgactctatgaggccaaagagtattccttgaacagccaagaaaggcaaaataaggaaaaagagcagttcaaatggttagaaccttgaactgtggaagaagatgcaccaaagagcctggatttacaactgtcaatcatccctcttattttacacaggaaaggcatttctttaatccacctgttcaattatttatcatgctgtgggtttcctcttaattgtcacttgggcaaagcctttatgctgtaaggggacaccctcatattttttaatgaccttagggaaagtgattgacactagatcctggagtcagatgttcctagtgacgcaacttgttctcctagtagcagaaaagcttcctgccatgattaagttagagctgtgaaagtgctaaaatgtgtagtcagccttcctctgatgcaagcacttttattatagggcctagttgtggagaagtgtagcaacacaaactctgtctccaaatacctgttttgtctctgaattagccactcggtagagaaaggcaatatgctctatccacgtgctgggcacttgaaatactcataatcacagtcacatcttctctatacttacaatttttctggctctacccctttactcttgtctacttgtttttctgagttcataccacaatgtgatcacaactgatttatgactggcaggctgccagtctctgaaccctcatcaactactctagtcaagcaaaacaagaagcaatccattctgtatttgaacttgaaatggaaaatcctctgtgtttgcttttctcgataggaggctgagatggagcaaaagtgtcattctattttttttggacatggcctacacttcccattgaaaacgcttgagaacttgtgagtaatgggtgtcagatccacggctgctcaacagtggatgatccactccatgttaaaacaacacagagggctttctcaactcctcttgttttggttttcttctctgtgcccactacttttcaggattccttaggcagagggtatttttaagatgtgactatctcctgagtggctggatcatgaatagtctctattatcgctgattcatttaggtaccaatgttgtaccacaactaaggccataagactagaatacacatgaggctatggcccatgaaaatttgtgattaacttggaaaggaaggggatatgaacagaaagtaggttttactcccattacttttatgctcaaaatattattacttttatcctactttgagcctactgaaccagaatttctggggtcagcacctaagttgagtctgatgcagtcagtactcagacaggcatttggaaaccaccagtcaagaccatctcttaagttctgatgcagtcactactcaggcaggcatttggaaacgaccagtcaagaccatctcttaagttctgttgagatgtaagcttctattattaaaaacaacaacaacagccaggcgcggtggctcatgcctgtaatcccagcactttgagaggctgaggcaggcggatcacgaggtcaggagatcgagaccatcctggctaacatggtgaaaccccgtctctactaaaaatacaaaaaaaaaattagccaggcgtggtggcgggtgcctgtagtctcagctactcaggaagctgaggcaggagaatggtgtgaaccccggaggtgaaagttgcagtgagccgagattgcaccattgcactccagcctgggcaacagagagagacgtcgtctcagaaaaaaaacaaaaaacaaaaaacaaaaaactaacaacaacaaaaatgaaaagccccaaacaacaataacagaaacctcaaaagcaacaagagcctgttagtaaaaaaccacattgcatgatcatgttatattttctacatgatttctacacgtattatagatattgatgcaaattttaattcaccactgtaactttttttttttttcacatctggtaccatcagaaagaatgtagctgtagacacaaccagtttcaagacttgatgaaccatccttaactgcatggcccaagggaggacattccatgggaacctacaatgcctgcattagcaagacagtggcaaaattgcaatggaaagaagaagaatttgcagccagaagaggtctagatctgggtgtgaattgtttctatcacatatgcactatttgatcatgagcaagccatttaatctcttcaagtctcagttaccgcatcaaaaaatgaggataacattttatagagcgtctggaaggaaatagcaaggcaatgcaagtgaaaatgctatgtccaccttaaagcaccaggcaaatgctaattggccctctactaggtagtttgatagcatcaaagttattttttagctatataaatttggatatagatatgccgaacacaaagaacctttagtttggccaaaaaaattgatctatgcgtggatttgaattttctctcagtatttgcaatttactttttttctagactttactatgagcttaagtatttgcaatttcgcacgtgacataagctgctgtttttctattaatgtcctatttgactgattttcttgtagcttccgtagttttatatgtcacacagattcactcaaagcatatgtcaactttgagacagacagtaatcctacctaatgtattgagtagcaggcattgccataagcactttatatctattaactcaattagtaattactacaaccgtattatgaaccaacattattcccattttgttaatgaggaaactgaggcagagagaaactgacttgtgcagagatacacaggtagtaagtgataaagctggattccaagcccaggtactttaaccacagtgctatggtgtctttaggaagatagtatgtgatatgatgatgaggagaaagattttagttataattttttttattaatgatccccaagtgcttgtgcaatataagaacctgaatatttggctggacacagtggctcacgcctataatcccagcactttgggaggccgaggtggtcagatcacttgaggtcaggaactcgaggccagccggccaacatagcgaaatcccgtgtctactaaaaatacaaaaattagcctcgtgtggtggtgtggtggtgggtgcctataatcccagctacttgggaggctgaggcaggagaatcacttgaacctgggaggcagagattgcagtgagctgagatagcaccattgcactccagcctgggtgacagagtaagactctgtctcaaaaaaaaaaaaaaaaaaaaaaaaaaaacctgaacatttcattatctgattataggtttgagctctatggatattggagttatttaacccctttgcttggacagaattttgcggttgatagatatccttaacaaattctttaattttcacccagtaaggtggagaggctgaaggctagctctcaccatcaccttttgatgttcacttatggtgttccatctgtgagtgctcctgattgctcctcctcaattcccatcacctggttaactcctttgtctgtcctgggcttatcaagtcaccacctgcaggaagccttctttgatttcccctgacatgtgttacggtttccaaatatgcacttccttcgcactgtgcatctagtggcaggctgaggctggcttataatctgaatcttgaattttccacaagggaaactcaaggaggatgagaatgaaagcatcagccatatgtttggtggcagaagatgtggctagggtcctgagcctcacaagactcaggagagagtgttttgatatttgttaaatgctgcaaatatatggaggttgtcagaaaaaatcctggcttcagatggcaaatcattccataataatctctaattttagtccgggtttctcaaaactgttgctgaccttactcttttttttttttttttttttttttgagacagagttttttgttctttcatccaggctggagtgcagcagtgcgatctcggctcactgcaacctctgccttctgatttcaagcgattctcctgcctcagcctcctgagtagctgggactacaggcacccgccaccacacccggctaattttcttgtatttttagtacagactgtgtttcaccatgtttgccaggctggtctcgaactcctgacctcataatccacctgcctcggtctcccaaagtctcccaaagtgctgggattacaggcgtgagccactccacctggccccactctttagcttagacacctgagactgtgttgctcagcttctacttgagacattccttcaagaaccaggtactgacagtttactgtgtaccaggcaggataggcagtgtggctaagtgagtgggttctggattttgaactcaggccctaagtgtgctcactatgtgatctcatttaatggcttcatctatgtctcagtttccttatccgtgaaatgaaggcaataatggtatctatttcactaggctgctgtgaggatcaaatgagatattccatgtggagctcagaatatgacctttggagcataatggatgcttgataaatgctgaagctgggactgcgatgacttaaacttccagtctctagtttggtttcctgatctccagagcacttcccgagaatttctctttcgctgctttgctcctccaaagtccaaatctaaatcctactttcccattccaaatccttctcctatctctaacttgctatgctgtatcaagcccacattcttgtgctacgtctcctttcttaaaactttaaaagcagatgttacacccataaaaatggctaaaatgaaaaaagatgaaaaatactaaaaaatggctgaagatgtagtgcatccagactctgaagagtgctggcaggagagtacactgactcaatcactttggaaaactttctggcaataaggctgaacacatactgtcctttaatccaggaattccacacctaggtctaccctcagcagaaacatgcacatacgtacatcaaaaatcatgtagaacaaatttcatcatagcacaatattagctacctactgctgcaaaacatattacccccaaacttagcaacttaaaacaacagacatttattatctcacagtttctgtgggtgaggaatctgggaataacttagctgggttcagggccaaggtacccattaggtacggcaggcaccaggcctagggaccacgatgcttgttagtacaatttcctccttccagtgagtgagatacttcctttttgttgtaatggaggaaggggcccacaaagacaaaagtgcataggtcccataaagtcaccgtgcagccctggctggatgggtttctcatgaggtctgtcaagctgtcatccgggaacacagtccttggaagcctcccctgggaaaagatccacttctatgctcactcaggtagtggctggcagttcttagttcttctctagttgttggctggagacctcagtttctcaccacatgggcccctgcatggctgcctgagtgacctcaggacatggtagatggcttccctcagagaaagagggagtgagggagagtgggagcaatcaaaagagagaaaaaacaagatgtctttataacctaatcttggaagtcaactactaccccttctgccatattctattgtttacacaaaccaactctgggacaatgtgggaggaggccacagaatctgtgaataccaggagtccgggatcatgtgataccgttagaggctggctaccaaaaatactatcttcagtcattaaaaactagaaactatccaaatgtctatcaacagtagaaagactaaataaatgatactgtatttgtacaatggaattctacacagcaataagaatgaaccatttataactacgtacaaccatatagattgtagctcataaacataatgttgcaagaagaagccaggaacaaatagtatacttgatacgattccactgatgcaaagttaaaaaacaggcaacacaactctgggtgttagaggccacatagtggtttcgcctggagagatactgatggaaagtagatacaaagggagcttttgggtgctggcaatattcagtatctttgtctggatgttaattccacaagtttataaaaattcattgagctgtacaactttctctgtgtaaattatactttaacaagagtttttcaaaagtagatgttgtaatacctgtattgtctccttttgctaaagagacattctggaaatgattttggttatggctaagcataaaactgggtgctataggctgggcgtggtggctcacaccggtaatcccagcactttggcatgccaaggcgggcggatcacgaggtaaagagttggggaccagcctgaccaatatggtgaaaccctgtctctactaaaaacacacaccaaaaattagccaggcgtggtggcgggcacctgtagtcccagctactcaggaggctgaggcagaagaatcacttgaaccggggaggcagaggttgcagtgagccgagatcgcacctttgcactccagcctgggcgatagagtgagactccgtctcaaaaaagaaacaaacaaacaaaacaactgggtgctatagactgaatgtctgttcccttccaccccccaatttatatgttgaaatctcatcttcaatgtggtatttggaggtggggcttttgggagtttattcggttatgaaggtgaaattctcgtgaatgggattaccacccttgtaaaacaggccacagagaactcctttgccccttctaccatctgagggcacagcaagaaggcttcacttatgaaccagagagtgggccttccgcagacatggaatatactggcaccttgatattggacttcgcagccttcagaactgtgagagagaaacatttctgttgtttataagccacccagtctatggtacttttgttatagcagcccagaggtttaagacactggggcaactacaatgtgtggtcaacctattgttcctggtgctaggcctcgcctgctgtgagatcttagctgaacagtcccttaacctctctgaactatagtttcctcaattgtaaagtggagtgaacacttatactcccagcctcagagtgtggtgaagaatatcaggtacagttgagtgctgttacactatcgagcactataatatcaagatcttccaagttcagaaccgtaatacttgcctggagaccagaatatgtatcgcctatttaacatctctctcacctgtattcctctctttctctttagggatggtgggggggagcgggtgatggaaagtaggtttgaggctttgtgatctggctctctggggttcatcctttggcctcaaacttctgtgctatcacgtgatctccttgtgcagtttctccaggcaggattccctagattaaccaagagagtaagatggggagcagagccaccatacagctatgattctcacctgggccagagaccagctgcacagaacaaggttaaaagttgtttctgtgcactctgggatgtctgtgtttagggggaattccactaggtgatatagctggtttctgatattctagggaggagtcagattatctttttaatacatttatgcatgcattttatatgcattcatttattttctgtcgcacctgcatatttgtatataatacaaccatttgtaaagatagaccttacccaataaaaacattttatgagataattgtgataatttgtaatcccaatttgagtttattctcctcgtgggagttggggttcacagtgtgtagaactatctctgcgccgtgcagctatgtaacagtatataccttttaatgtgactagaagctccctaaatggagcaagtctttcccgtactaacagaaccccaagatagccactgtgaagtggcttagggaagtgtgtaagggtgggataaatggagaatctccaccaactcctcacgtttaggagagatttgatcccattttggttattacaatttaggtctttccatagaactgtttcttctgggactcaagtagctgcatggggccccctggtggccggaaataattcatgagtttgcttttcaagcattttgaaggccaggtcaggctagagaagaatagagagtaaatattcgcctccaactgctgcttacagtggaggtgtaatagagagtgagatggcctctttgggggaaaaatgagaactaaacttttttctttaacgagattagaatggactataattctggataaaccattcactttctgattttttattttttggctcatttagcaccttaattaggtacttattgagtacttaatctccgtaagccattatgttaggcatttcactagggttaaaaagaggatctatcacacacttctaaggagctttggaataaggataaaacttatgccaccaacacgacagaaaataaaagatgccatcagagaataaaagatgaactcacgaaagggcatttactttcagataaaagggaagacttccgggaagaggtagcatttgagctgagtgctgatgagaagcaggatttggggagattaaaatcaaggaaacaatggcactataagcgagggaaaacacaagtttggacagacatggaggcaggaaaaccaaagtcgggtgcaagaatggtgaatagtctattctggctaactcataaggaggtttggggattagagtgagtatgaaaactggatacgtccttttggatcagactggagaatcttgaaccttgtctgagtaatttcttaatacagcaatgcggtggcggggtggggggtgggctttgagtatctttgcacggagaagaggcatgtgaaggcacagactcacttgcattgaaatgagcacagccccctaaacttgcatttggttgggaggaatgttgatctgtacgtgacaccatctgacctgcaaagtcatttttagggtgtttccacttaccaaaactacctgagcatgagggagtagtaagggccccagggctcctgtcatgtttaattaaatttctggacagaaagactttcaatgagtgtgctatgctaggctgattttgttttccaagttttaagaaaccttcatgcctatctttcgattctagcttaaggtggtttaaactacatgaatgagctgtatttctggctggagttacagggtagagtcctagctgtggactagctcaatgtccactgaagaattcaagcagtaactttatttgcattgtattagatctaactgagtaagaaacctgagaatctacattatgcctggcatatagttggtgctggcatacgtgttaagcaaataattaacaactgattccacaaaaatgtaatatacatttaatagcacattataaagttcctgaccaaagacgttgatttcctaattataatagcacagaaatcctttagaatttagtaaacgtaattaagactattcagaagtaatgaaaaaccaatatgataaaaacaaaaatcctccagtaaagaaggaacctgtccatttgagagaaatacaattgagaacttgcaaatgagacaagggaagatggcaatttggaactgcaatagaaataactatagcagaaacaaccatttaagaagttttagcagcaataagtatttattattctgaatgaaatgtacagttgacttttatataaaaatcatcaaaagtgctatattggattattttactattaatttaacccccaacagcatctattagctataactttaatgggtttttctttacttctgatacatcattacaactggctaacactgtccaatgttaaaatataaaaaatattacttttcaagataaagtaccaccagtgatgagttattaaaagtataaaatgaaaacagacgccagtgaatcaatgtattgaaaaaaattatcacagaatttcatagacatatgcgaaacccaaggtaatttagatccttggcagaacatttttatgatacatcttaagactgtaggttatttcttttggaggcaaatgtctagtgtgccaggcctatcttgatttttctcatcttttcttggctactttacagggtgaaccaaatactgtctaatgctgtgcactcccatgacccccaaagtgtttcatgtaaatagaaagctgatttttcagtctcagaagtagcccttagggttaagtttgtcgttaaagaagacatgagtcattcctcacaaaggagaagcccctccaccctcccacccccattcttccagtctgctccaacgccaagtctgttctctcccaccatggttctgggtgaattgggtgacaaagtcagagcacgttttccaggcccaatggcccatttggtcgtattcagtctcaagcaaacaagcttctctgatttgccacgagagctgtttgactctcccgtctcttggctttcttgctcctttgtctcactttccagcacaaggcactggaggctagtaaaaaaagtccagatgacagaacaaccaggccaaagatggagataatagacccatgggaattgaagctgtaagccaccgcggtgaccacgatgccggcgatgaagacaaccacagcaaaggggatgatgcagcggtagcaggagagctcggtaccccctgtagcagccatcaactgaatctcactgaccagagggactgtggtgatcacaacttcactcttggggctcttctccatcgtcgctgccatgtgagcctttggggctcccaggatctccttgatgggctcttcagtcatttttacaacagtgcttctaagctgggtttacagactagatctggacagtctcaccagggtgaaagctgtgaagataacaggagatgtcagctacatgtatcagaatgtacaccctgtaagcagaaatgaaaagctggggaggcacctcctttctaggaggcacagatccatgtgaaaagcaactttactctttttttgaattggttgcattctctttgcatttaggcaaaaaataagatgaagcagatgcatatgaagggaagacagaaaaagcaggaagcacttacagtgtttaatataccctggcggtctacaaaagttttacaagcttttctgctttgtctattgcttctccttcctctgaatacacagaaatgcctgaatcctaatccaaagatggtctcattcaagaggagaatacattacaaacaatatttcgtaccattaatcccagaacttacagcaactcagactccgccaatcttgctgggcataacatgcattctttgcaaactatcacccattggctgcccacaaaatcaatgtcaaggcaagtggccagcaacaaatgatgttcttctccattgaatgacagccaacaaatctttattgtgttactattaaacacagtgcaacctgctccctgggatctttttattacccactttaggtggacagttcagcaaaaaattcattgaaaatgaggtggggatttgtggtctgaagtgtaacaatatcttccaatctgctataaaagagaaaaaataagaaaaaaaaattcaaccccttcataggatataattttgtgctttctcttggcaaaataaaatcaattatttgagtaattagctgtcaattcacaaattttctattaagctcaacacaaaatttcgatattatgtatactacaacatgcagaaacaaataagcatgctaggttttcaggaaactttcacaaccttcattttcctccatgcctttgtgtataaaacttgctgcaatgaccctttctaagtatttcgtacctgaacatttcaggacaaagcttgagacttttgatcaaaagtatctggttgaaatgctgtctatgagaaatcagtgaaaacttgtctgctgctcagacatggttgagtcactgtcttccattctcaaaaagctgtctagctgctacacagttgagcagttgtagttaccgaacaagtttaaagaaagatacttgagaccatttcaatgagattcatactttaaatatattaagcatccactgaaaacaaattcaactccaaatcaaacctcactggttcttccctgctctggaaagtcaaaatatcactccctgagcaatgaaactaaatcttagagctgcctactcacatgtcatttttaatcaccaaactaattaatcactgttgtccaatgacaccctaacttctggtgaggccagttaaaagatatttgagattatgtctgaaaaaaataacttcaccccaaagctgagattgagctaacctgaaaatcaagatctgtccccaaattacttacactcacctcggagagaggcaatccattaccagagtaaccacttgacttggaagacaagaaacagcaacgcctgagcctcttcgtccaacttctgggaaagagcctctaacagcaaggctgtcaataaaacaataggttagggatctcttctggggaaaggaaaagatgtaaaaatactttactatagggtctgctctggtttgggatcctggagttcctgcttctttcaggctacctctgttcctaaatgacgcttgtctttccctccctctctctttttattccctccccctcgggtttgcccctccctaacatttttttttttccttcgttcttttccttgccagcagattctgagttttggcttcccccagctttgctcagtgacatgatgagtccgaatcatttctacagattccccagagacaggagccagcttttactttttctcttgcagcatttactaagcggactgctttgtgaatttgaatgactcattttttcccccgccgacctccagatcttcctcccgtccatcaggcatttttataagaaaatcccagagtcagcgttgcagacccggctgaggggacagagccgaggggacagatactctagggtggcagaaacagctgtgaagtcatcaggcagctgaattcagtctctaagccagcaaaaatccatgttcctaggttttccattattctttatatgtgcgtgatagtcatctgaagcttaaaaccccacttgttgagtgttaattcatttaggaatgagggtgggaggcacaaatgtttgtggttaagggggaaagccagttatattgatttaaacatgattgtttactgcttttgcaaggaggtaactttagcagcaccaagattatcatcatcatgataattgctaccatttatagagcacctactgtggacatggcacaatattaagaaatgtcacatattaatgttaattctcactagttcataaatgaggaaacaggctcagagaggttaagtaatttaacaaagatcacccagtaacagagacacccttggtttgaaccctaatctttaatggatatatatatcatttggggagattgttaaatttagattctgattcagtaagtctgtaacaagctccctacctatgttgagacctctgttccttggcccactttaaggatcaaggtattttaaacattcaaacatatacaacttgacacatcatacttaaacaataaagttaaacatctatttcccaccccataaacctgtaagtgactttataggtttatgctttcttacagacaaactgtgaaatttttaaaaccttgaaacatataaagcccaagattgtctttttgaggagaaaagataatactgggagctcatcctacactctgtagttaaaagtttacatcctccattttttcatctgcacaagtgttaataacctcttctaattaatactgtgaaccacaaatccaaattaactcttggaagagatttgttttccatctttctctcaaattgttagatttctctaatagctggcaaagggcttggatgttctcaaacatctcgcctctcctctaccacagcacactctctccagccttgccttgtagcaataccctgatgacttgtcacaaaaagagagggaccagaagttgtttattctggaatgaaagccagagagagggttatgtccttataaaaaataaagttgaaaagtccctgaggttgggggagtcatggcaagtacctggaggccttggtcaccatgatcctcacactttaaaaatgtcagacctaaagagacagctttcatatctgaggagtaccgtcacttggtgttgagggtcaggaatacttagaaccagggcatttcagaacttgccaaagttgcccccggaagatggtaagatgggggccgctggctacgtacaatggaggttcttgagaagctccttaacagagctgtcttctcacctgcaaactctggcccttgagggcaattcccctctattttctagtaccactttgcctgcaagatagcccaataactgcactgaagctctgaatatcaccttattctgttgaaaagcatgctttcctgttaccaaagctaaaggtgcaaacattgaacgtctagagagaggacaatggcagcttttttcatagtaagcccttgactgagtctataatgaggcgcagtgagtgtgtctgtgtcctaggagcacaaatctgtcatcacttccaataccaaagctttcttcaaccttgtcaggctcaggtgcctcattcacaccaatgctcctccacagggtgtgtgcacctgccttgatacacaggtacacatctctagactctgagtagacaaccaatgatttgtattttaaattcaaagaggtagaaagttttggtataaagcagacattgtatcagaagaatagaagcctgtcatcctaaccactgacacatgcagctttaactgactttacctcttcaaattgaaattcaaagagaattcctagtgatctatgcctgttgtttctgaatgtttattcctccttccactctgtgtctacaaagtattaaacacccctgggcatcctttggggacacctgcccccaaatgcaaaatttcatccacaatgcaaccagccttatttctgcgagccctctattttcacaaagaagaggaaatctctctagttctttctaaagcacatggctttaggagactcctttaagtttggagaacttttctcaaagcctccaatgcatgaattatatctatgcccctaacccccatagacattcaacatttccttcccagatctttcaaaaagcaaagcaaagatccttacctttcccagccagagttagactgagacagctgcctgccctgccaagagcaacccagacagggggatgcaaatcaccacattagggaccgtaaacaaagtactcagcaaggcttaaacacaattaagggaccggagacaatttggcaagaggaaatcccttaaatgctgctggattttactctgttgtcctccatgaaaatgtaacccatatatatgtgtgtgtgtgtgtgtgtgtgtgtgtgtgtgtgtgtgtgtgtgtgtgtatacagacagagacagagagaaagggcatcaagtttgagaagaatatcttccttcacttttctctttttatatctttattcaggcactaatttgcaaggtttttcctatccaaagcccccattctgatgctctccctctgtgaatcagaacctgcagaaaagaattcgtaatctttgctctacatttctaagggagtatggggttggaaagtgtgtatgtaggggaatgggaccataaaccatcctctttcccaataacatgcaggtaataaaaggagtacaaggaagattaggattagtggtgagaatggcatttggtgcctgagtggaccctctccctaatgtcagaggagtggtcctattggtgctcttcattggaggatgtcaaggcaccatagaaattatgttatactgaaaaatcacacctccgaggtgaccttccaccaaaggcattgtaaacggcagagctgggaacatttgctgttccagagagaatgccccaaattgcaaaaatctcatttttttttctttagaaacaaaatgaaagacaaagttacttaggggagaggggtctgggagtggaggagggcagggagcatggtgtgtactatgacaaagaggtcattttgcccatttccctaaagtggaagccaaagattcaggctctaaggttgcaaaaggggatgttttgattttcctattgagtttgtgctgttgaagacctggcaatttctcctctgggaacacatgaagttcgcattttgtgaagcatgcccccatgtgcatttgattactcgcctgtctttatttccaatttgcttttgcttggtgtgtttgagctggctaatttccagcagccttgaggatgccagttcctcttggccttctgtccaatcaccacatgcctttgatctcagtcatcacccagtccaattggatgcagggagatttgggaagctggccaggttttctcctctctaatgcttcttttaagggtgtgcctgcatttatgttctgaaatcatggacattttggaaagtgatctgtgcttctgtgttcattttggatagcaggtcatgttattattcctccttttctttttttctcctccaaaacacttttctttgaggtctaggacattaaatagagagatctgatagtaccaagaggaacaatgaatgtgccttagatataaatctgtattttactaattggtggtcaatttctaggtatgggaatctcataagatccatttgaatatagaaagggaaacatacatcttttagattcacattacaatccccattctcttaccccattttgttctgagtaactatgaaaggtcacataaacataaaaaaatagagctgagtaaataatctctcacttcaacaagaactaattaccattctggcctcagatgagaagaattgattttcttgtctcaaaatcagaatatacaccgaaactcctgccatcctgatacaaccccatacattttgcatcgcattttatgtttatgtacgttattctttggaggccaaagatgaggaagcccgaagttcgagagttacctcaaaatgggctgacactttctttcctaagacaaatgcacactcctagggtcagcctcccttagtgagtgagctaaggctcacatattctggggcttgcaggaaacacaccatacttgtttttttttcagggaggagaagggaagggatcacaatgacctcacccctttgccactcctccctatacctgatagcatggagccctttggtgctcgtttacaggagaaatctccccctagtctcaggtgccaaatatcacttgtcttggtcataaaattatgtacataaacattgtgtggcacccagtcgactcctaatcgctgtacaatttctaggctttgacaccaatctgatactggaaattggaaatcacctcgcaacatgtaaagtgtcctaaaaacggataatcaatggtatctctgtaagggtcagttagcttttccccattccatagtcacagagcagaatatacttaccgaccagattagccttgtctcagttaggtagcactggccttaaaatgactggctcaggatgggctcatcagtgctggcctcctccagataattgaaagcacagtttaaaccataggttttaagttgcaggcttggtaagaggagcatggaggatatttttcacaagtcactttttaattttgctgagaaagaaatggggagggaaaaaaagaaatggaggttcagagactggccctgtttctgggtttaactccagaacctgggctccttccttctgaactgacgcacacaatgtgctcagtttgaagaggaaagggacacattaacacaagcatctaacatgtactacccataacacagtcatctctcaggtatttgtattttatttaaagtggcagagccaggtttcaaatctaggtacctctttcttcttctatgttgtgttgtgaggaattcatttttaaaattatattatgtacattttcctaagtttagcttaagtctcattttcttgggttcagggtgatatcctctaactagatttagtttgggaaaagtgctctgaaaaggggtgcctactgcttctagaatgattaagccatgtattttgccttgtatacatctgagcattaaaatagagctgcattactaagcagatttgggtaggtttgaggccgggacagacataggcctggtacctgcggaatccgtggaagatgccatagcagtcaggccacttcaaaagtcacccaggccattcctctgccttcagaagcattttagttcctgtgctcctttgggtgccaggaacttgctaaatgctctagctgagcagatgcaaaacagtgggcaaagcatggtctctgctttcatggagtttaccatccagaacaggaaagtcacagggacaccaacgtgggtaatccttttcttgaaggaataacaaacggctgtggaaggcccagggaagatgaaatcaattcaggcccaggggtgtgtgtgtgtagggggtagggggtggtggaggttggaatcttcatggcacacaggcatttaacattataaatagaaaaggaaagaacatgattctaggtggaagaaacagcctgtattcaagcatagctttgaaaagtgcaagtcttctacaaagagcactgagtagcctgtttggcagaattttaaagagcacagggcaggcagagagcagtcaaaataagaccggaaatagtttatggtcggattatcgcctcgatggcgagtttggactttcttttgagagcaatgtggttttgaacaggattgcacagtgagctctgtgcattataaacagtagcctgactttatagagtgttggcatgtcctagggaaagtcaatatggggaagagggaaagcaggttgagacaccagttgggatgcctctgtgattgtccaggtaagaggcaatgggcacctgatattggcaaacgcggacaggtaggaaatcactgcaatggtagaatcagcaaaactcagcaatgaatttcaagtggggaaagttatcaagggagaggagtttgtaaggttttaaactaagtaattaatagcttgaggttgctgtgagcagaaataggtcaggacaaggagtagatgtggggcgaggaatatgtgataattttgttagcgtagctattcacttctccggtggagaggcaaatgctagagaaggttggcattactgcctaactagtaagttatgatgcattgtgtgaattgtcaaaaaattctgtcataggctcacaaataaaatttcgagtaaaattatgaataattttataattcacttcattccatatgcatatgcacacacacacaattttgctgacacacatacaatatatacacaccagctgtgagattgctaatgttttgcatagaataaaaaaaatttaagtattccaatttgagactttatttttactgaccatatgcaaagaatttattgatgatacattcaattttaaattgcttgaaaataagaacataactatgcaattcttttttacagtgttagacattattttaaaataagcactacatagatatcttctggtaatgaaaatattttctccagtggttactactctaaggtactactcatgaggaaggaatatatagaaggttcttgtcttgccacttcacatatggagaaacgcttttgccttactaagaactaattttatgttgcccccatgagtgaatactttaaaaaaatagcaatccaaatccactacagatttattttggaatgtcctgttttgggcctcatgcaatggaagcaagcctttatgttgaggggtttaccatgaacatgttggttgggaaatcatctgtcagttcctcaaggacattatcaacaattttgcatgcttagaaagtcattgccaaataagtcaatgaataaataaaataatgactctacattgaaatcggatgtaaatttaaaacttagataattatttaaatggattattttaaagtacccagatatttagtgctaagtacattaattattccttatcattataatgataaatagtaatttataaatgaatagtaattatagtaattattcaattacatttggaaaatggtgcctaggactagaaccaaagtctgattgatgccaaagcatgtcttcctaatccctgtggaatattgtttctgtgttcaaatgatggcatgctttctgtagctcataaggagtaaacttgccttcaaataatctcttgggttttaaaatgattgcttcaccagaaaaaaaaatgccattgccttcccacagaacctctgtagtgttatattaattgaggatagaactagctcaacaaatcttttgggagcatttttatcctcttaaaaagtctttgatattcacgatgtgtgtgggtagtaggaaacagaacactttgcccagctgaactgagttcaaaatagaactgtttatctaatgaacttatcttatggaacaatgcagagaacagatctcttgctctctttctttagataaaatttttaaagtctcgttttgtaaaggagacagaactttgctgtctccttcttgtttacttaaataaactatacaggaaacaggcattattgtctttgaaaaagcaatgtaaaaacttggtaaaaccaatgatccccagagagtacacagccacagaatgagaacacgatgtttcttccatcagggcacacagaagggcaccgagtctactttgaattccagctgtacatttgtacccagttaatgaatctgctgttgataactttggatgacttccagtatgatggactcagtagtctcagggaaaccttgcttccctgatttatttcttgctatttattttctaagtttaacttagtttgcaaaactttctttacagcactgatagggcttgattaccttatttttacagcgctaatagggcttgatcatcctttttctagaatctaggttatagcatgaggttttggatcgcttccacaataaaatgaacatttctgactctccaatattatgcaattaaaattagccattaactgaaagtcgagaaacttgagtttgattcttttcctctttgtggcttgggcaagtcacccaacttctgagtgctctattgtcagatctcaggattccatctgtagatacttcattattcttttcttagaaaaaaaaatcctatctgggctcagaatatcagagaactgagacaagacaacttggggaaatagctaacactactacacaagctaccagaacagctgtaggaagcctcttttttaaaaaaatattccctgatgcaacatctgtcagcaaagccactgaccttttactgtggatagtcatctatttccatgtgaagagagtcacaggcgtctggctcggggactgactgcagcacaaaggttttcttcagtcccaatcagaaattctaggttttcaggttcgcacactaattttcactccttcttacccaaagccaatgcagtaaggagcatggggtgtccaataccataataaactgtaaactgcatttgaaaggaaagcagcaggggccagaactcacacttgtggagcctcaccctgctgtgactgacatgacgtaagtcggagacctcggttcacagttttatgtgacaggacacaggagcagccaactttagggaagactgataggaaagcccaagggtgaatctctctgggaacaggaagcatgtaccgcgggaccaacaaggcttttggacagagaactttcacgggttttgtagaagcaactgggctcccctgaggctgccaagagggtgtgctctgatcacatggactgtgcatttccttagagcacctcccttcccagcccacggaatccagaaagaagctgctgtgctgctgtgtgacctccatcagtgcagtggattcctttataagcacacagttctcataagcagagaaaaacgtaacactgtatattcctctcttctccaaattttcttattttctttttggtaaggttacaatcttaccactgtcaaatatgtcctgtacaccagggaggatttgtgctacctgcctcagaatcacacagggtgcttgcaaaaaatacaggtttctgggctccaccccagacctactacattactgcatcaggatagtgtgtgtgtgtgtgtgtgtgtgtgtgtgtgtgtgtgtgtgtgtgtgttgaaaggtcagaaacttgtgttttttatctgcatccatatgaagtttgagatcctctgcttaatgctaatacagaaagctatcaagtttgcaaatccggcctcacccctctttaaaacccatccatgattccccctcatctgaggtctagaatctctacatgacacacaagtcttcccatgagctggcctctccctttctttccagtctcagctccagcttggatcaaattacaaatcacaaacaacacattattttatgtttgtcatgctttgttggttcctactcttggaggctcaagatgatgtctactcatcttttcatgactacctcaagcatcacctgcttctagaaaccttccctggtaagtcctcctctattttcagactaggcagcatgaggtcccttcccccatgttcccgtaatgtttatgccagtgtttctcaatctgagtacttttgacatttggggctggataattatttattgtgaagagctgtcctgttcgttgcagaatgtttagcagcatctctggcctatacccactctatgccagtagcaacccctcctctcctgcacagttgtgacaaccacgaatgtcttcagacattgccaaatcaccctggcgtgaaaatgttcctggctgaaaatactgctctgtgcttacatgtatcatagccctcaaaaaatagtgtggaaagtggctgtttgcttgtttatcttctctaatctaaaagactgagagtttcttaagagtaacgagtgtacagaattaacctttgtgtcccctacactaaagcacaacatctaatgcatagttagacataaaatacacatttcttgagcaaagcgttattgatggactagatgtcagaaaccctagccaatcttggttggctctactgcttgcaacgttgtgactgtggacaaataagtcaacagctccgtgcctcagtttcccttatttggaaaatgggggtaatagtgccctccttgcatatttgggtcattatgcaggtatgggaaagtataaagtgcaggaagaaccctggttatagtaatgtgacctaaaggttgctgctctcatatttgccttctctggaaacattgaaagttcagggccacccacacaatatcatccactttaacaatagctggaggatttcattaatgcagaacattataaatgtgagaaatcttatggaaaatgattgaacctccagtatggaatgagaccaacataattgttaaaagaattctcttaacataatgctgtacagcacactatgaatatcctaaaggtcaaacgctctcatccgtatctgttatgcctcctgctaaagactcaaccaggcctaaaggagccttctctgctacagacctgtctgattttctgttcttgaggaactgcaaatcccattctttgcaccctcttctgtccttcttcctttctgctctgtgctaggacagccagctgcttccttgcttcctgactcttaatatcagttataggaaattagcaggttttgcattgggatgcctctcctattatttattaccttcaagaagagctttgtctctctttcattgtctctttctctgtctctctcagtctctctgtatctctctctctctctctctctctctctctctcatctctctctctcgttctctctctgactctctgtctctctctctctctctgattattttatgacttccttttatactttgtccattccactactgttgcctccgtgctatccaagcactgtggtaagctgatttatatacagtatcactctccctacttttacagaaataattagcttccagattgtgttcagctaagaagcacccctgttgcatggaaatgtggactgtgcttctcccttcaccaccatcaacccccaccccccaccagctgcagctggccaggctttcttgttaaccatttcatgccccaaacacttagagtacaaaagcacttaaaaactgtaacattctctacaaacgtgtcaaaaagtcctaaacacatatactgacagtgcaacaagaaggcttggaaattatctaatctagctctttcactttagatttgggcatattgaaacctgaagaggttaagtgactcactcgttaccattttctttgcatttctaatcatctcaaaaggcaatctgaatcattctgtaatctttttagtgtatcatgactaatctttattttccaatctttcctatacttcatggtcccctcttttaagcttgaaatagtaagttccttttagtataggctttggagatgtttcatctgaaagaggtgatagatgttgtttttaaaacactgagttctatgtatctgtttttacaagtagcacaaggtttagggtaattaacaagtttttattttttgcatatatttagctatgggagaatatatatccatgtttagatttactatggtacatctatttatttattttaaaattttattgtggtaagaacacttaacatgagaactacttaattattgttggctatatcagaattgagtcagttttccatattatccagtaaagtatgttcactttgaaaaaatttttcaatgtgcattttactatatttttcctaaaggcatggaaattcttatttaaatatttcctttttagctcattgtattagtctgttctcacgctgctaataaagacatgtccaagactgggcaatttataaaggaaagaggttttattgactcacagttcagcatgactggggaggcctcaggaaacttacaatcatggcagaagggaaagcaaacgtgtcttttttcacacggcagcatcaaggagaagaatgaatgctcagcgaagggggaagctacctataaaaccatcagatctcatgagaactaactcactattatgagaacaggatggggaaaactgcccccatgattcaattatctccacctggttcctcccaggacatgtggggattatgggaaccacaattcaagatgaaatttgggtggggacatggccaactcatagtactcattaaccttaatacatcatttgctatcctttgaaaaaaatccttctcaaggctgtgttaatctgtttataacctacgattaaagttttcaaaataaattttcaataggagactacagtgtataaattatatgtcagtgcctggcataaactagacactcatttatttttagttccctatacccactaaaagtatatgttttgactttccctataaaataatgccaaacatttcacgatgtgatagccaaactgaaattatgcttctatgatctttcagaaatgttcttggataaatgagtgaaaaggaaataaaaataacctttaagtgttaggaaacctttcaatccagctacacaccagctttacccactcacttccttctctcttctgcgccctctaccgactaccaactgcaagtctgtattaaattagcaaatttaactgttttgaacaacaaaaaagcaattttccccagcctatgcctgaaagtcattaaaacacaaatgattgctttaaagaatcatgttgtcttttttctttttttagtggcaccaggaaaacctagctataatgtaaaaaatgagacaatatagataaacctaagtaaaaaataaaaatcacatcaactccaccttcaacagaactaccaatattttttgtatcttcactctgccttctctacataatatgtacgttatttttcttataaaaatgggattatatattttgtatataatttgtataaactttctctttttgtattaaccatccatggcaaactcttttcatgtcaataaacggataatcagaaatggctacatcgtgttccattgcaaggatgtcccacaatatctttgtgggcacacattaagtctgcttccagcttttcttgttgctttttttaaaaaatttcctctcatgtctcatcttctccatgaatatatgatagaaactagggccaatagtgataataattaatctcaggggctacaaatgacaggtatctcaatatacacactcttttgttaaatacttctgcctcattccatttcctatactgcttattctttcctactaaattgcatctaaatatgcagtattagttcacatttagtgtgcacacaatagtgaacattttgtaaagatgtaaatttttttctcaataaaattcaagaattttcacctccaaaaatgagagttggctttcatgaagaaggtaaaatctaaatacataaaaataatgagagaaaaagataagaaataagggctcctaatacaagggatttagtctatgcaaagtagaaattccagagaatataatggaactgaaagaacacaagcaaaggtgaaaacaatagaaggagaacattttgagccaaagaaatatttaaatttgatacttaaaaagattaactgaaaagaaatggaaaaaatatccccatgtttctagatatatccaggcaaaattcttgaatataaaagacaaaactttctatgagaatcaaggctttacacctgtaatcctagctttttgggaggtcgaggcgggcggatcacaaggtcaggagatcgagaccatcctagctaacacagtgaaaccccgtttctactaaaaatacaaaaaattagccaggcgaggtggtgcgcggctgtaatcccagctcctcgggaggctgaggcaggagaatggcatgaaccccggaggcggagcttgcagtgatctgagatcgcgccactgcactctagcctgggcgacagagcgagactccgtctcaaaaataaataaatataaaaaataaaaagaatcaaggctttaaaagcctcatgtattctataagggaatagaagtcaagccattttccccaaagctgaatgccaagcagtcactgtttacagaattttgagcgtgaaatcaaattaggaactcatgaatagtgaagatgtagtttacaagtactcaaagtaagcaataaggtcatactttaaaaacattttacaaaagtaaaactataattctttacagagaacaggcatgtcttaaaccacaataatactaatccagatttttattccgaggtataagcaaatccaggaaacggcagatgttagtgagaggaagtataaacttaatatatttattttacacagagagagtcagaaataatttttttctttatactaacatacatgatatatctattcaaaacctaaaggtaactataaataagattgtctcttttttttaaataatttcacttcttcatttctaatgttccttcttttaaaagacagtcatataggatggatgtctattttagttgtctattcctgcataataaacaaccccaaatatcagtggcttaaaagaacaagagttatttattttgcctgtgaatctgtaatttagcccaggctcagtggtgagagctcatctctgtctgctccagatagtgttagctggggcagtccaacaggattggacgggtgggtgggaggatctgctttcaagaggacgccttgatatggctggcaagttggtgctaactgcgactggggagctcaggctccagagctgttgaggccaggctgttggtcaggcgctttagatgtcctccaagacatagtcttcataagatgcttgggcttcctcctgggatggtgtctgggttttgggttctaaaatgatgtccaagttctgactttgtaggcaagaagtttgaattgtatataatgcactgtcaagtcattggagcattttagggagggagtgtcatgatctctgggttctgagagagctccaaaagaaacaggaagctgtttatcttttatgaccaagtcttggaggtcacagaacatcacttctgatgtagtcagaagtctgctccaacttaaggtgaaggaacacaggctctacctcttggtgagagaagtgttaaagtcatataagagattatgtgggaagagaaatactgttgtggccatttttgaaaaatacaatgagtctatcttcaaaatgctaaaggaaaaaaaaggctttgtttaaattttaaatttaattttatatttttagagatgggtttcactctgtcacccacgctggcacaagcataactcattataacctccaattcctgggctcaagtgatcctcctgcctcagcctcccaaatagctgggactatagacctgagccaccatgcctggcacaaaaaagtatttttaaaatccccaaatagatgcccttatttggcttggtggttatgagaaatgccttggaataaagggatctggatttgaatcccatttgtaatatttactttctgtatatctgtaaaaatgtcctttagtcttcttaaaccatctgttaaatggaaatattgatacttaattcactgggtttgtagtgagataatatacttttaagtactgcgcatggtcactgacacatattatactgtcaataaacggtattttttgtttcttggtgttttttttttttttttttttgagatggagtctcgccctggcacccaggctggagtgcaatggcacgatctcggctcactgcaacttccgtctcctggattcaagcgattctcctgcctcagcgccctgagtagctgggactacaggcgcgcatcaccacgcccggctaattttttgtatctttagtagagacgaggtttcaccatgttggcctagctggtctcaaacttctgacctcgtgatccgcccacctcggcctcccaaagtgctgggattacaggcgtgagccaccattcctggcctaaatggtagtttttaaaaagacaagaaagactgcaatactactgtttacattgcttgggagttccagcccagtgattgtcaagtttgtttttatcagtagaaccctttgcctctctggccaggtgcaatgcctgtaatgccagcactttggaaagccaagatgggaggatggcttgaggcccgaagtttgagaccagcctaggcaacacagtgagatcctcgtctctccaaaaataaataaataaaaacctttgcttctcataaacacttcttcagagtctgaatgcagaaaaccaacaacttagcttttatttgtaaagcaaagatgacagagcctagagctctgtacctgctagtttaccctacttcctgcaaagacaccaggagcatctgctgagacattatgaaaaccattgtttcagcccagctcatttaatatcatgggaaagaaaaatgattggtacagctattagaaaagctatggtaaagttatctccttttttccccttaacaatatgattgtctatttagaaaactgaagagaacaacttaaaaactaatagaactaacaaaagaatttagtttggtgactaattcatttatcatttataaacacacatatatatatacatacacatatatctatagccctagatccaaatctctctccctctgtatgtacatatatatatatattctagatatatatccagaattcttatattatttcacccaatagatatttgcatacttattatgtgccaggtgtgtgctagcgactggggaggcagtggtaagtagggtagcaggtctcactgtccagcttatgctctgatgtgggagacagacacttaactaattactaactaactgagattagtgttggaaagcaattaatatttatttacttatttactttttattgttttcctcctacccccactggggtacaaatccaataataaatgcaataaatttcatgcaagaagaaaagaaaaggctgaaataaaaaaaaagaagagttgagggagggttggggttaggggaggagagtctatggaaggagtgctcaagctgatacccaaaaggtaaggatggctgaagtgctgaggaggacaggtgaagtggagaggacagcatgggggtgcgggggttgagaagagaacacaggactttgtaggcaaggagtttgaattatatttaatgctctgtgatgtcatgggaggattttagggagggcgtggcatgatctccttagcattttaacacagctctctctgtctctgtgtagggagtggatccagcagggagatgtcagaaggtcactgaatcatcagggcaacattgatagtggcgtcagctgggtgggcagtccagatagaaagaaatgaacagattttagctatgtgggaagtagaaatggaaaaattgttgacaaatcagatatagggtttgaagaaagcagaaaaatatagttgtaaggttttcaaacttccaaacaaatctgatttgtcctcatggacacacaaccttagtgaaaaagcaagcaggaggcgcctaaataagttttcttccctggcggaagtggtctatattaagtctgctgaagtcacccaagcatagtctactttcccagagaaagacagccaggactctgattcaaacttgagacctccactataaagtgaagatttcaggtgcaggaaaaaagacatcgatatttatgcagattagtatgagggtgcagttctgtagtctggggatcacagcccaagtgtaactctagactttcgggctgaaatatcctggtgttgaacttggatctcctgccataatgaatcagggaacggaagggacttcgtaatacaatacatccagcttgtctgtggaatcccgttactggaagaaaggtgaatgatgactttattctctgatcccttccaggattcaaacaaacctagtgttctgaactgtcattttgtttagtgagtttcacataaagtatctgtattaacaggtaaaactgtaaactcatctttcctaacatctgattttcatgttcttattttacttacgttagcaggctaaatataccatggactctcagtctttatggatgtatgacaacatggtttgactaactgaataacaaagttattatccaatccttgtgcctcaattccctcatctgtaaaatgaaagtggtagactcgataacacataacatgtacataaaatgatttctgcaattcgttgtttgtgttcatgtgtttacatggactactggttaaggatgagatttggcatctgatacatctttgtactctacagcagccattacggccatgaaaccataaaaatttatactgaaggagctttcagatgtagcctttaatgtattcttttatctattagtgtactcactcatttgacaaatatttattaatgataaatacacaattgtcaaatgaatgaatacataaataagaaagagaatacattaaaggtgatatctaaattatttttcagcatgacattatatgacatttatggctataatggttcataaaaagccttttggtaatgaagacctttataaatgtaatgaggttagaagctgtgttcactgcttcatgcctgcagatttgacatccataatagatgcccaaaacatgagaaagggggctctgaaatctcacagaactgactctaaactccagctctgcctttgacctgcccatgagaccttggacaacttacttcacttctctaaacttcagtttcttcctgtgcaacctggagattataatagaactgacttcacggtgaaattgttggaattaaatgaaaacacttagcatagttcctggtccataatgagtactcggcaggcttaaactattattaactgactgttgcaagttattttataagctttagaggccaggaacagtggtctctaaagcttataaaatgacatttttttttttttgcttcttcattgccctaccatgataaaactctagtgcttttgtgtgtgtgtgtgtgtgtgtgagatgtattctcactttgtcccgcaggtgggagtgcagtggcgcgatcttggctcactgtaacctctgcctcctaggttccagtgattctcctgcctcggcctcccgagtagctgggattacaggcgtgctactgtactttaataggagtagacatgcaatagtaaaagttgaatagactagaactaaactgatttggatggcaattgaaacattaaaatcgactctgctgcagaatttagaaatgcctatcaagtgttcactttcacttttcggagtgcttttgctcatattatctgtttaatcatgtcagcaaatccttgagatcggcattattatttttacatcactgttaagtaaacaggtttaaaaaattaaagtgacttgtctggttcttaaagtgactagaacttgtccttgactcttgtcttgggaatccacatacaaaattaattctacaatgtgaaaaatatctttaggggaagtgagaagttctggtcttacccagatgttttctctatgataccacgtatttcattcacttctcaattgctcggtgcataatagcttttactagtaaataagaacagatacagtagcctctccttagccatggtttcattttttcaggtttcggttacttgtcaactgaggtctgaaaatattcaaagggaaaattccagaaataaaagaattcataagttttaaattgtgtgccattctgaacagcgtggtgaaatgttgcaccatctcaaccccttccacctgggacatgaattattcctttgtccagtgtatccactctgtctacgttgagtgactcacctgctggaaggcagccagctcagttatcagattgtcttgataattcagtgcctttcttcaagtagcccttattttacttaattatcctatgtaatgaatagttattgttgttaatatcttactgtgcataatttatgaactaaattttatcacaggtatgtataggcagggaaaatcatagtgtatgtagggttcagtaaagaaaaatcatagtgtttgcagggttcaatactatccgtggtttcaggtaccccctgggggtctagaaacacatcccctgaggataaggggatgtatactgtatacttttagtatctcaatttcttgaaaaaagttgatcaacaggtaatgcatgtgtgttctctatgcagttagacatctgtgaacattcattcatttatttttaatagcattccaaaatggtgttttttttctgctattttttcattacaattatacctttattagaatttttaaatttaaattatgtgtaattcaaaaacaccaaaaggggcagatagtaatagaacattcatgaacccaccacccagcatatacattaatatcatgccttatttactttatactttatttaaaaaataaaatattacagctaccactgaagttaatctgaatccctcctatttacattttaaacacttcagggcatatgtatagtttataaacactatgaagtttcttgccctgtacatccttctgtgacttgcctttttcatttaacagttttcaagatttattcatgatatgcaagtatatatattgtttatttaaaaaactatcagatgaacatatttatttatttatttactctgtggttggtggatatttatgttgtttccaagttctttccactaaaataatgtgcatccttatgcagtattatcagttctctcaggtatactcaaaagtggaactgctgggtcagactgtgtgtattctcacatttaataggtcttgttgagttgtttttaaaactactatttgcactttaaccagaatgttttatgttggaacttccatttccctgaaaattcaccaacacctaaagtcagattttaaagtttttgccaattttctgtaaatgaaatggtacaactgattttgcatttttccaattactatgtaagtagaacagcttttccttgtatatatgctgtttgggattttccactgttcatattctcagttgcattatttgggctttcttattgatttctgaaattttgttgtatattttcaatattgatcctttgttggctatgtgagtaacaaatgtcttctaccaatctatgtgatggattttaatttgtttatagtgtatgactgaacaggaactcttgctttttaaagtaggcaataattaatcttttatggtttgttctgtattgtgtctttaagaatttttttttaacttttaggtcataaagatttactcctatattataatttaaaagtttccacattttgccttatgcagttggttctttacatgtctgcaatttccattattgtatgatatgatacaggaatataattttaaaaataacaatagccagttgttccaacagcagttttaaaattgtccatccgtgcttatgtactgtgtttcgaaatgtacatggacttgatgatggatagaaagctgttacatgagttttttttaaatcactttttccctagccctaggtcaatatgatattattttctttatgataaatcctaatatcttacagggaatatttttattttttccctcctactttaaaaaattgctttcctatgttttcaaattgcatgacctttaacacttccttatgaattttagaattggtgtgtcaagttccttgaacaccctttatggaaatctatttaaataccattggatttatagtttgtatagatagaaatggtgtttaaaatattaaatatcttaagccatatgtatagtatcagtgagaggtcagtgcagaaaacaaacactctctaggtatctaagcagaaatgaatttaatacaaggaattagttgtgggctagctcctggaataagtatgtatttgttttttttttgttgtttccagatgtatagggggcagaaactggctatttttgttcatttgctccttcttctttttcttttttctttttttgcattgtcattggagaacagtattgattcttctgtatttgttgaaaacatcctttgtggcttacaagattgccaattttaatgaatgttttatgaggatttgcaaatgttggtgtgttctacttattgagtatgaggttctatatatgacctttagatcaagcgtatgagttttatgcttaaatcttccctatctaccagtttttctgtctgcttggtcaatttcctaaaaaagagccttaaaatgttccactgtaatgatgaatttgctgatttctccttatactgatgataatttttgccttacatatttgagattaagttgtaaaatgaatacatacaaatttaagcattccgagtacctgaagagttatccttttaccattaactcagaaacttctattaacttttttcttttaaagtccatttagtctgatattttaggagtcacacaagctttcttttgtttcagatttacttgtatatattttccatacctttaacttcacatttctgtgtaattatgttttagttattgtctcttataaatacatatatctgggtttttcctaaatttttattttgaataatttcaaatatgcagaaaagttgaagaaatagaaaataaaatcctggctacctttcatctaaatttatcaattatttattttgtcacttttgcttctctatctatatatcaatcacactttttttaatggaaccatctgaacataagatgcaagtatcatgctgcttcacccctaaataattcagcattcatttctcaagaataagaatattattccactcaaccacaataacattttttacacctacaaagttaacaatagttttataatattttctaaaagtggtgcataaacaaatacccccaattatcccagaaatgccttttaatggctttttcctaatccacgactcaagatttatgcatgacacataattgttatttcccttgacttttagaatagtttctttcatattgaattgttttagtagttattctgaggaattttccacttactggatttgtctgattggggtcttatgactagttacaagttagatattttggcaaaaatgtttaggtgatattataaacttattgcatcatgtcatggaggctgtgatgtcagttgtcccactatttgtgatgcaattgatagcttggttaaggtggcaaccactagatcttcccattataaagttacactttcctgactgtacgtagtaagtaatcaatgggtgattctttgcaatcaaatgaaaagtctaatctgcataccctttcacccagtggttgcagcatccatttatgatccttgcctaaatctattaattattaatagggggtcaaagaatgcaagttttcaaatgttgacattctttctacctgaattttttggcattcttttctaaagaagaaattttctcctctctgtcttccctatttttcttccctactttttttttaattgagtaacactgtggacacacagatttctttttaaatccaatattttataatctattactataactattctttgtgatctcaaatttcccaaaatttggagactgggaactctttcaagccaactcccatatcttttagacataactctaattgtctttgaacgtctctccttattctcaggcacaacatgttttaggcttactttagaagttccctgccccagttctagaatcagtcttttttccaagaatcttttagtagacaatgatatacagaagccaagaactggccacaggtgcgctcaatgctaatggcatgccaatgcttctaggcttccagatcattttaatggacagatcaaggaacacacacacacacacacacacactgaattgtactgcattgctgaatatatcacaactcgttttatccattcacccattaaaggtcatttgggttgtttccagtttggggctaatacaaataaagcttccatgaacatttgtgtacaagtcaatgtttgaacaatgctttatttttttctcttgggtgaatacctaggagtatgatgattggattgtatgttaagtgtacgtttaactttttaaaaaaattgtcagttttccaaagcatttgtactgttttcatttctaccagcaatgtatcagagttctagttcctcagcatccttgccaacacttgctttgattaatctttttaattttagctattctaaaatagccatagtggcacttaattgtgattttaatttacatgaccctattgactaatgttgttgagcatcttttcatattcttatttgccaccagtatatattttttggtgaagtgtctgtttaaatttttttttttacctatttttattgggtaggtttttttttatcattgatttgtgagagttcatatcctcaaagtttaatatgcacagttaaagtaaactaaaaaacactaaagttaatatcttgcatctgcctccttaacacaactctgatcttgccctcccttgttccaggtttctgtaggttagaacttttgttccactttatttttatatgtgccttttttttctgtattctccccacccacccatcccatcccctggcctctttattctctgattattgggcttcagtaagaagtgtttagccttttcaatgtgtccttcgtgtttcttaattactctttcatgttttccatttctttatacctctgttctgcttcctgggaatttactcatcacagctactttcttattccctgatctctcttgaactgtggtagggcaaccattttacctttcttttaaatttttaattttaataactatattttgtatttatggagggtctacttggttatttttcaaagtcaatgctcttctcttccccatctgcattctgaatcacattaaaggtagatgctaatcagacaatggatcagcatttcacctttattacaaataaagctgcttggagaacagggcttgggtttgtggcaacaatagaattataacactctgcctataatcaaacttgccatccaggcacaggcatcattaggaaacctagattctggtgtcagagcctgtcctcttgagtctactataaaacctaaggcagatgagaatgcatattttctatgagtagacagttgccaaaaaggaagagccagaagggttgatctagacctgaccagtagttccttctcctaaactcatcaactacagtcatgcacatcataataacattttggtcaatgttggattgcctgtatgatgatggtcccatatgattatagcaccatatttttattttaccttttctatgttaattaggcttagatacacaaataccattgtgtcacaattgcattcagtattcagtacagtaacatgctgtacaggtttgtggcccaggaacaataggctctacaatacagcctacatatgtagtagaatctaccatctaggttggtttaagtgcactctatgatgtatgctttaggatgcaattgcccgatgacacatttctcagaatatatccctgtcattaagcaatgcatggctgcatttaaatcacccatcttctccagagtaggagttgagcaaatgagtgaggtcaaacatttccctaatggaagttcctccactgggaaacactgcatggggaggtggggagaggaccaatcatccattctaagaatattcaggagctggtgttgctggctttcattctctcttccctttctgaaacctggaagtatcctttttcacttttcagctaaaccatgtatttacaactattttcaacacgttttaaccaacatttccatgtttgaagccaggagctttagttgccattttgccagaagttgtttcagagagttttttttcacaaaggaaacaggctattaaggcaacttctcaagaacaggccttcctggatccctttcctagctgtttttagactttagagataccataaaatatttcctaacattattctttcattaactgtaataaaataactgagtgtaaatctcagcatattcaaggatatatttatttttctcctgagtttattaggcaacacacttttaaacacatacaataaatacaatttgaagtgcgtgctttatatcttgcatgatgtcgtttgtgttcttatgcttgtctccattagtctattgccatatagtaataaagctttatcaaatcaaacctttataatggattccttgaagatacttgaaaatacttcatagccaatagtttttacacaattggtttttcaagcaatgaatttccatttaaataaaatatggatttacaatacatagaaaatttacaaggagttataaaacagtgggaaagtatgtctagcctaaacttttgtgcatttagtctaggaaaatttcacatccctctttccacacctataaagccaaacagaaccaggactgacttgaggaaagcaattatttatctctgctgtgtctaactaagcaagctgccaaatgtgatcatttgcctgattggaaaatcacataaattaagactttgccatcaactttctttcaagtaaggaaagaaaagcatttcaatatagtaatgcaaaacaagtggaaattgttattgaacatttacttggacgggcactgtggaaaattattccttgtccaaccacctcctcagctgtaactggtagcacaattcttgacccattttacagattaggaaacatgagtttccagagtttattggcactcacgtggctgttacatcgttttgatgttcaaacgacctactttattcaaagtcaggtagtacagtctgctggtgggaaatacagtattactcaagggacttcaaaggaacaagaagatgtttgagttgcacagtgagctaaattatgcaagttgcagaaatcctaggtggatagtacgacacctttcagatcagtttctaccctcaagggtggcaacaaccttgtagatccattatggattaggtttctaaactgttttggtgttatgaacccctagagtcttctggggaatccaatggacctcgtctcagaataatgttttacaatgtatagcagaaagaagagaaattatattgaaatacacttctggcatttgaccccttaggatttttccagcatttctactctgcccacctctcctctcatgtctaccaaagagactttctctactttattcagaaaggtaaatgagagacactcaaacaggtctgtaggttatgggagtagcagggagtatgggataggctactgaggagctgtttttgaggtgacatcactgtctcccttcctttttcccttccctctggaagcctccttacttctccagctcttccttccttccccacatcaagtccaatttttctccttttacttcttgtctatcctcctcactccttgctcagccccgcccgcttttctaggcccgcccctccagggccccaccctcaggccgctcctccagtctaggccccgccttctcctcagtttcctgccaatgacgctggggcagccggggcagccggggcagcccggtcaccccgcccccaggcccacactaagggtgtccgcggcctgccctccaggcggaggagcccggactgcggaaggatggagctggccgccggaagcttctcggaggagcagttctgggaggcctgcgccgagctccagcagcccgctctggccggggccgactggcagctcctagtggagacctcgggcatcagcatctaccggctgctggacaaggtagcggccaacccgctggaggaccgcggggcctagaatgcgccggggtcgacctccccgcagggagtgcggggcggcagtcgcggaagggacaggggcgcgtcttctccggctcaggaaggagctccgcccggaccctgtctcaagctctggagctagcgcaggggcggtgcctccaagtgactgccgtgcagatccaggggagttggaaggtcacaggagttcagcctcaggtcaggcccgacggggcatgtagttagaagttaatgacagttgaaacgtgggtcagctggttcctaggcccgtgcacacgtctgcaagggacgttgatcctcactctccaatgcgtgtcagtggcatatgggggctggggtgggggaggggcggtatcttagggcttggatataggaggaaaagaaacagaacttttcaaggactggatgtgcagggtggtgtcaggggttgccgagaagggccctactgttttagtgactcgtttcttttggttgttgccccttccttccaagttgctcttaataagttgagtccgaatcttcaggcaggagtaaagatgtaggaggaatgggattggttgttgaagtctttggaatcaggtagccatccaggtggaaggcattgcccctgaggcctgtcatccaaggcttgtcatcagttgctttgtgtaatagtcgcagcatggcaagtaggttaaaagtcgcctgcaggtaatgtgggtgaaactgaagtttcctaatacaggaccaggatattatagtgttagagttaggaggatacctcatgctcacctggttaaaccccaggtttcataggtgaaagcaacaggcctcaagggtgaagtcactcctgaaatggcccagataagtgaatagcagaggtgggattggagggttcatgatcttgtgaatgtcaaacatgtggttgcctttttaggcacttgcatttttgtttacatcaaatatagtgtttttatattttaaaacagaaaacaaacgtttgcaatatttagaagttgctcacctgttaaacaggaatgaaaactctgcctgtctcattgcaggaatgaaaactctgcctgtctcattgcagggttgttagggggttcaaatccaatctgtcagatatgtgtgaaaatttgatagctgtaaataactctacaatgcacaggacagtgaccccatacctctcccggggaagaattatccagtcccaaattgtaatattgccaaggtcaagaaaccctactctaaataaatggagaatataggtattatgaagaaatttcctgtctaaatacatatatatttgctttggatgcagtccgtccctctccagttagtgggactgtaaaacatgctatttggaatacttacaaattagtagggctggcctttacataatccagaacacagcagatactgcaagtggctaagctgccatatttactttttttctgtatacagatgttatatcttgatggattactcactcaacaaactctgaatgcttgctgtgtactaggaccattgggtttaacaagatgatcaagaagttcacagtctagaacaggcagaattaatttcttagggtaactttaaaaggtaccttagtttgaaaattgatacattttcagaaaaagtctttcttttaatttttattttttagagatgaggccttgctatgttgcccaggttggtcttggaactcctgggctcaagcagtcctcctgcctcagccctcagcctcccaaagtgctgggattacagggatgagccaccacacccagccaggcaaaattcttttatcttctctgctattccatttttcttaccagccacatcaaggctttggccaagttttgttgattcaactgctcagacgtgtctagcatctggcttatttcctcccattttctttcctttatctttgctactttgggtactcagcacccctcacttagaattgcagtgacctcttaactagtttttggcctaccagctctctgctcctgtctatcctacaccttccagtgcagtcaaacatctgagaagcagtgatcttatcactaccttttcagtggcctattgattgcagaaataataataatcatcactgtaatagctaacatttattgcatgatttcttataattcaggtgctaagtgttttggaagtattgatttactcaatccttgcatcaaccctatgataaggtactatgatgatcacctttttacctatatataaatgaatgcatagaaaggttaagttggtttctcaagattccagctaggatccaaacccagctgtctgcctccagtcctgtgtcttcaacatgctcctgcattgcctctccaaacagaaggcaaatgctgcctggtgggtacactgaactaatttggtctcaactcacatttccatcattctctcccattaccatagacctgacatcttctcctctagcgagcccagaccgctgtgccatcttccctgtatacagacgaggcagttgaggtccagggaaagtcagtggcatatacaaagcacacggctaagaagtggtgaataaaactgggatttagatccaagtccatctgcccatgaagcccctactctttccccaagccacacacactctttttctaataaagcttccagcatgtgggatggaccgtcttaggagggtgagtcctcattattggaagtacagtactgtgttggagaaaaaactcaaactgtttttttcattatctcaacatcaccaacaacacagaagcacagaagactcctgtgaccaaatgtctgaggatttctctccaaacaccaagtaagcagtcagttttgcggtggacgtcagctaggtgtcctcctgttcagtgttgacactacctacctggaaatagtgtcagatcccgtaggttgaggtcccagtcccacaagattaaccccctcttccctgccacttgtaatgccagttgaaagccccaggttgttttacctgtgcttctgaccaactggctgtaaataggggatcccatgaccccctccttggattcaattaatttactagagaggctgacagaactcagggaaacacttgctttcatttactggtttattataaaggatactacaaagtatacagatgcataagatgagatatgggggaaggatcttggaacttccatgccctccttggatgcatcaccctccaggaacctctatgagttcagctatccagaaactctctgaaccccctcctcttgggtcctttatggaaacttcattggctaggcatgattgaagcatggacaacagtgttgaaatatgactggacagaaagggtctgatctcatattaatagactgattggggaaacccaagaaggcctgtccagattcttctggcctctccatgcgacattccttcttccagggtatgaggcaggaccctccctggaatgaagttcttgcaactcttggctcaactcctgaggcctaaagtgcaccaacgtacaaaagactgtaacgagggctatgagagttatgaaccaggaacagtggatagaaacctgtgtgcgcgcgtgtgtgtattggatgtacagtactggagtatgtatgtgggtgtgtgtgtatactctatgtccaatacacacacgccgccacacatatgtatacacacatatgtaaattatatatttatatacacacatatacatatgtatgtatatgtatacattttgtatatatagctcataatatcacaagtactgtattcagaaaggagaccagagacaatttgtttatatacttcattgagcctttattgaggatctgcaatgggtcagatttccatctatggaaatggatctgagatagagttgctcccctgaagattctagtggcttagttatgaagttatgggcgtcggttggactgatggtcctttaaggacccgattgtgcatagcatgcttgccactgtgtggtacgagctggttgtgacgacccttcactttgcttcccacactcagcatagaggtggccaacctaaggccaaagctatgtggcttcttggggctcttgagcaagatttgaaacaagaatagagaaaaagaaaattgtgaccatgatttaaatgatgctgtaacaaagttactgttacatgtttttaaaagactgaaagaagagtagaggctcttgaaagagatttcaatgtagcaaattgtattttgaaataaaaataatagaattgtgtccttttttttagtagacacaaattattctgaatcctgttcttggacaagtgggcaattttgatgtacagcttttgataatttttttttgttttctatttttctcttaaatcacaaaattctggactggaaagtttcttctaagccatgctgtccaacaccattatctttttcctctacttcttctttctttgcctactctatttccttcctctcttatttcttctccatgttgtaatgataataactttatttgatgctgcaaattataaatgctgtcatataagttttcacttatccttctaaagagatgtggaagataggcaaaaatgggcttactttacaaatggaaataagatccagagttgttgagcgagccacatgagacctcataactaataactaatgtgaacagtctactatgataaactcagtaccaaatacacaacttgcttccatacaagaactacattctgtttccggaggctaaagcaaaactagaccagggctgccatgggtattgtgggaaaagcatggattttggagtcagatagtcctgtgtgagagtctcagctctgttcctctatcattcatttaagcatttgggagatattcatcaactgcctcccatgtgctactgtcttcatagaccctggggataagtggtgaagaaggaacatggtgctgctgcttcaatgaatgagcttcttgaacatggatcatattcattgatgagaataagcccatagtatatgatgaaatgtccagtggaaaatgctataaagtactttaaagaaaatgttataaagaaaataaagcgagataaaaggatagagagatggcatggcagggtagccaggggtgatgtgatgtgtttcagataagggagtccagaaaggccctctgtggaagtaacatttggccgatttgaataatgcaaatatctggaggagaaatgaatctgagagtgtttctcaaagttcaagcacattggaatcactcgagacagctttacaaaccataccaagccctaccttagggattcaggtttaactggtctagggtggggctttggtggtccttttgagaggctcccccttcacataggggttaattattttgtcctctctactttcgtgtatgtttgaaatctttcataataaaaccgttttatacacgtgtgtgtgtgtgtattatgaatgtgtgtgtgtgtgtgtgtgtgtgtgtatatatgtatatatatatttaggcttctcaggagattcatatgaacatgctggcttttaagccactgagatagagggaacactgggttctagtccctcagccaggctgagcttgcctcattttccaggaggagccaggaggcccacaggactggagtggatatgagattgaagagtggccaggggccaggccctacttactggccaggtgatattgatcagttactttttcattttgaaatctcagtttcctcatttgcaaaacctggataatacttacctttcagggttgttgagaggattgaacgaaatgataacatggcagaattgttctcaaacttgagtgtgtattggaatctcaaatttgagcatgcattgagtgtgcatttggatatatatatgtacacacacaaaagcatgcattgagtgtgcattagaatatatatacacacacatgcttgtgtgtgtatatatgtatatatatacacatatatacatgtatacatatatacacatatatgtgtatatacacaagcatgtgtgtgtgtgcatatatattctaatgcacactcaatgcatgctcaagtttgagattctaatacacactgaagtttgagaaccattctgccatgtatcatttcattcaatcgtctcaacaactctgaaaggtaagtagtatcctggttttgcaaatgaggaaactgagacacacacacacacacacacacacacacgtatgtatatatatatgtggaaaatactatatgtgtatatatatacacacacatatagtatatatgaatatatacacatgtatatgtgtgtgtgtatatatactaatcacactcatcaatgaatgtgatccacgttctcatcaatgaataagttctatgttcatgtatgtatgtgtatagatagatagatagatactcttcttttttatgcattatatttctaaccagctgctgaatgatgctgaggctactggtccgggaatcacactttgagaaccactggtggatggggagcatctagcatggtgctgaggcagttctgacattgagagctaaagtcagaggcaggagaataccctagagatgagatgcaatggaaattgaaagatgaaagtgagaccaaaaaatgtcttaagacaaaagcaacatccattttagggctccctctccctgatgtttaagttagtggtcacttgggagtaaatgtggtcccctgagcagtgctgagaagtttccctgagagaagggccatgggtcacttagaaaagctcttccagtgatctgcaagtcaggcccttgcaggaacttcaggcttcgttaccatgccattaaccactgcccatagagtgtggaaccagtgcgcagaggctcacagcttcaatttagagaaaataaatgttggactgaaaagctctggctgatggcttgacttattaagtttttaaatctaaatatctggcactgtgagaaggggcagcctaaattgtgtttttgtccttgaatagggcttctaatcaaagagtttggtgaggagcagacagtactttcccagggactgttcttccctgtgctcttgacctactaaaattctcaaagaccagcatgactggaaaaactgcatttgggcaggctgggctgagagaaagtttggcctttagagagaaacacagatccatctcacaggagaagagatttcactctatagatgtgaaatccctactcctatttccccagatgggataataagccaattagcatcatgagccccattacttcaggattgtaaaactgttctgctcctttctgtcatccttctgattaccagcgtgattgatagaatcattcttgagccctggtcacttatggagctgaaatttacttgtgggcagagccaccatgtctccaggacacccgtctgtggcattctacttcccaccatagaccaaggccagctccttcttttctgtctcccttgagtgtgcaactgggtagataagttagagtctcagtttttccctctcctcgcatctgtcttaggataagcctgtgggtatgaggccatgcgagaatgctggtctcaaggttcagatttggtggaaggaggggagaggaaggagtaagatgcctcccttctgtctccaggtataagccaagctttatgctctcactctgtctttcaccagattgctgtatggcgattacaggaggtggctattaataaaacaaaacactgatatttcattcagccttgggaatcccttgagaagagagatgacttgtagggaagggtataggcattctgaatgcttggacataataccataccaacatctggagtgaaccagcaggtgaatctggggcaatgctgaatagaggttcttgtctctatacatgtgccttttctggacattttgcagaacatctttaagcctcagttttcctgtttgaaaagtgggtttactgatggtccatacctcgtatcattatttggattaagtgggataatccatgtaaaagcacttggatcagtgcctgctgttcagttaatactcagtaaacatcagctatgagtattgttttacctagctgtgtgcaaccctgaaggattagacctatcacattttcttagagaggtcttaaatattaaatcagatttagccaactatctgtctttgtagagtcttggcacatacttcccagcagcagctgcagctttgacttctgccattagaactgctttactttgatgaaaaatacttatttttcataccatctgagtctattacttgccccaaagtggatggacttggacagcttttagataaatagattgggggtgtttcctgtccctctgaggaatggaaatgagcgcttctgtgagaggcaaagagaactcaatgcacactcatgagtgcattcacaggatttgagaatatgtgatttatcaagaccaccttgtagttagtggtgtaaattcagataaacaccataaattggaggtaatgagtggtgcctttctccaggcctggatgggtgatgggacatctacaggagattactcctgtgtggggattgcaagtgtcatttgcaaacattacgacattttgacacatctcatatgtaaatgcatagcatctctttcagagtttattctgtttgggacaaataagtgtactgttgacaataatatttctcagaatactttaaccttgtaaatataattgaaaacaaattgcacagatgttttttttcacgcatttgaatcaccattgctgagaaatataccagtttaatgtttcgacaagttagccagcacgatagcatctcaaaaattagtgataacagtaacagatttcctggccatgcattcccctgtctccagcctccatttcttcacttataaagtggagttaatgatgcttacatcacaggattattgcaagtattcatgattaagcccagcctggcttagagcaggttcactgtagatattggttttcctgaaaatgtacattacagttctgaatcccagttctttaatctggaaaaaggagattatcgtacctaccttgttaatgaaatagtaacctaccttattaatgggaatgatatctaatatttactaagtacttattatgtgcaccacataatagaactttagatggattatctagtttaatcctcataatcattccatgaagtagaaacttattagacccattttgcaggttagtagtggaagaggttagattctacccagacggtgaatctgagcccatgctattaccaccacactgtcttttctgactagcttttctgatttatgagacagcactttggaatagtatatggaaaaacttggcacagtacctcatctgttgaaagtgataatattcatctttctctatacctgcctttctcctggttcctttctgaacccttcagaagcagcatctaaaaaaaaatacttcttctggccctttggaggcctgttgggcaaacacaccaggcttagggactcaggggagcatctcagtgggaggtccgttctgggtggcctggagcaggagtactggcttagggaaggaaagggttcccatccaggctttgccaccaacagcgtcatcagctgactcttggcaagtcactcacattacacagctaagctaagaccccttcctgctctaagatcctgtgtgatgggtcttctttatctttatcattagtttgtggtctggaacaatgatttgggaatgacatgcagagaaaatacagctaaataaggagacattgtagggaatagaaggggccagtgtgcaaagacacaccatttctttctgtctgtcctgttactagctgtaggacttaggcaagtaagttggcctttctaagcatcatttccttctgtaaaggtagagataacaccaacttccctatctacatcacagggctatcttagctgttacatgagagaatgaatataaaacgttggaaagtggaccatgcttagaaaaacaatgactagtattattgaaagaatttgtagcaggtcaaagggattagaaaactccttcaaatacaaaatacatgacttttgttgtattgttaataaatcatcaagggaaacagaatccagtctgcagtcaagtagaagcctctgcctggtttcttcttgggatcaagatatagtgaataccagctggtattcactatatgtactatagcaggtatatataaaaatatatatacctactggcattatatatacacatatatatctgctggtattatatataaaatatataatatataaatatatgtaatatatattctatatataacattatatttatgtagaataatatttctatatatatttatatatattttttctgagttagttattcaaaggagacagtactttttataacatggcatgtagggtcttgtacgcatttgtgcaaaactaaatgttgtatctcaatttaatatccattaaagtgtccattatctcttccttgacagtacattttagcaacatttatgtacttctgtactgttttaatgaatttatgtataattatatttcttgtaaatattcataagtcttaccagcactattctgtcagtctacttttttaccttgatgtcagatttttaaaaataaatctggacttggtaaggagagacttgtattcaaatggattatttcaaggagttagggaaagaagtattacagtaggaaaagtgctttgccgataagctctgcaggcatcttgggagttgcagagccgttcttttataaagaggagcaaagaacgttagaaagaaccatatgcggggatgtgggatgaaaggatggcatgatcggatagcagatcagagaatacttttccctgagcccagcctgttttcaggagggactgtatgctggctcaggtttaggatgggccaaagttcaggggcctggaggaaggagaaaagttcaaccagttgggttaacaagcattttgttctggttgatcagtgggggtgggcagcttagctaatcatttataagacaaagaaagggaaatctggagggtctgtgtctggccttgtcataggtaaacgggggcatccgtgagtcttatctaagtcatatggggaagggtagtggatcttcacagtaaactttatgaaacacaaaaggtaggggatttcttaaccttcactgtaatctaggatgacagggttcaaataaaattcagcattgttgataaggaccactatgtcaattaggattgtttttagctacaagtaatagaaaattggacaatcaatgacaaacagaggcatgtttatctcacctaataaataggtcagagttctacctattggtagagtttgctgtcattgatttagcattcagtgatgccagcaaccctctgagtctttctactctgtttctcatgttgattgcctcttggtcataggatagttgcagcagttccaaccatcatgtccacatttaaaacagggataagtcacacggctacctctccctgcagaggagaccagggaagttattggctgtttacattgccacggggttctcttaataaggagaaggagtgtttaccacatcaagtcttatgtttcttctggcagttgcattctgtacatgatactggctaattctctacttccaacataatccttttactatttgaattgtaggaaactaaatgtcttataactggagcattagaaaagtatccattatattttagtctagataaggaaattgagccactgttagaggtggttttctggaggagcttcaggaaaagccaagaatctcttgagtaagcttctttggagtcatttattcaaatgttagtaagcttggaaaaataaaaccgatattgcaaaagatttatatctctaattttaagagatcttacacatcagatcttattatagtagcaataaaagttttgccaaataagttttgctttttcatatcaaattgtttgtataaacaatggtgcccaacgctggtgagatgctcctttggaactggtgagaggaactggtgagagtacacacttggtgcacacgttctgcaaggtttgtaaaaagtataaagagccttaaaatgttaatctacttatcctaaaatttatctgtaagaaaacatttgtagtaaaaaaaaaaatagaattatggaccaattattctatacaaacataaatattctggaaattttttttcataaaaatatttggaaacaaatttttttggagaataattgagttaggtatggagtcttcataacctcagtataatatttagttaaaaataagaatacaaactatttataccatgtgattcccgtttgataatgtacagatgtatttatttacttaaaggaaatatgtcaaatattatcagtagatatttttggattatggggttacatgtcaccttttaaaaattctttttgtcatttttataaactttttaattataaaaaactattttttaaaatatgaagtaaaaatgagtgtggttgctgagatcctttttaaaaagaaataatgggtgagaaaatgctttgattcaagaatgtggaccaggctgttcagcgcttggacattgtattgatgaagtaggaaaggtgttgccgtgttatggagcatttggttcctctggagctctggcattgctcagttctgcctcgaagggaatgtttaaaggaagttgtcgcaatcgttcattcttctgtactcacgcaaattatggttgttctatttttctcttccttgagaacttcctgttctcattgtctgtgccatataacaggatggaagtcactatgggttgtaactacattcaggagaagaagagaaccagtgtaagggaacagtgtgttttaatttatgcagatatccaatgctaacttatttaaaggttggggaggtcattatcttaacacataagaattcttgttgcttagaatgtgtggaaaacaaggcctcagttttcttgaataattgctatttgtctcccttccaaagcctatgatgaaaacaagtgtgtatgagtgtaaatgtgtgggtatgtataaatccttactaagttcaattgtgtgtgtgaggggagggggcaagagagagaagatgtttatcttcctgacatctctcatcagaccctgaggtctgcccttctactggggcatccatggcatggcacataaggggttcagatagactagtttgatatttgctggttggaaattcttggtataaaatcacatgcttttagagctggaagattcttatggattcattttcaattttacattcattttttgccaggtactttcacatacatctgagattcctaaaccgggatgtatttatccctaggttataccacccaagctagaagacccttaaagcttcaggatctctagaaagattcagcatgtttattccttgacttcccctcaggccatggcacagtgtttacagagagggcttcattcatgcatgattaaccagtaacacggccttagcacatggatgcaagagttcatccaaaagtttatgttcgttcatttgtttctttgcctttgtgttgaaattaatctaatagccattgctttaattttaataatagagcctttaggcaaagctgagggtcaggaattgtaaattgccaccgtacagagagtgaaatgtgtgatggggcaactctaggccaggaccctcatggacaagaatatggcttaccaaggaaacaagggaactctcttgtactttggaatctagaaaggccttttcccaaatcaaaggaacttatatgatttgaagcagatttcttttgtttttcattttcagtcttttatacagaatcaaaaagaagcagttgttgaaaaattctgtcttggaattgataaaacaatgtgttgggtttcactatgccacatggctatttaaaatataacctctctcgagaactgtagctgcctatgtgacacccttacttggatgcttaataaacatcttaaactcaacttgttcaaaagagaactcttaattaccccaaaagcccaccaatcacctcttctccaagttttttttctgtcttagaagatggcattcccatctgcccaacttgggttatgaaagttatccttgattctttgctttccctttccccaggatctatcaggaattcctttttactttacctccaaaatatatccttaaatcactgactcctcgccatcactgttgttacttccctgttcaaatcaccatcatttcttatctgaactattgcactggtcttctcacccatctccttgttctctgatgatctattttctaccaagcagcaagaatcacctttaaaaaattaatttgattgcgtcattcttaaactgaattacgaatcagatctggtcatccctctgtttaaagccatccattagttttccatagcaatgagaataaaatctttacctcttaccctggtttacaaagtccttggggtccagccctgacaaactctctaacctcagctcctgccactctctcttttatccagagttctccagaccccaggttctttaaagatgccagcccaccaatctgaggaccttccttctaccaggaacgggcttttcctatcttcctatggctggcttcttccaacatttggaacaagatgctctgataaatgttaactctcatagaggcctttcctgatcacctgattacatagatgtcctccccatccccgcccttgcaaggcatcatttatcacacaactcttcttaccctatttaaattacctagatggcacttatagctatctctagcactgctgcctacctgaatttaagatctctgagagcagggcctgcacctgcttttttatcattgtgtcaccaagaccacagaggaggtcagtgtttggtgtggcatgaacgtcgtcatcagctgcttttctttttttttttttttattatactttaagttttagggtacatgtgcacaatgtgcaggttagttacatatgtatacatgtgccatgctggtgtgctgcacccattaactcgtcatttagcattagatatatctcctaatgctatccctcccccctccccccaccccacaacagtccccagagtgtaatgttccccttcctgtgtccatgtgttctcattgttcaattcccacctatgagtgagaatatgtggtgtttggttttttgttcttgtgatagtttactgagaatgatgatttccaatttcatccatgtccctacaaaggacatgaactcgtcattttttatggctgcatagtattccatggtgtatatgtgtcacattttcttaatccagtctatcattgttggacatttgggttggttccaagtctttgctattgtgaatagagccgcagtaaacatatgtgtgcatgtgtctttatagcagcatgatttatagtcctttgggtatatacccagtaatgggatggctgggtcaaatggtatttctagttctagatccctgaggaatcgccacactgacttccacaatggttgaactagtttacaatcccaccaacagtgtaaaagtattcttatttctccacatcctctccagcacctgttttttcctgactttttaatgattgccattctaactggtgtgagatggtatctcattgtggttttgatttgcatttctctgatggccagtgatggtgagcattttttcatgtgttttttggctgcataaatgtcttcttttgagaagtatctgttcttgtccttcacccactttttgatggggttgtttgtttttttcttgtaaatttgttggagttcattgtagattctggatattagccctttgtcagatgagtaggttgtgaaaattttctcccattttgtaggttgcctgttcactctgatggtagtttcttttgctgtgcagaagctctttagtttaattatgtggaatgcagctttctctcaacttgggaaccaatagacatttctacctgttctgtttttatagaagactggactttatgagtataaagtctttggtgttctggaggactgctcaccaactctactggcagacatctatatggactcagattacagaaaacaatgggaccagtatgttaaaggtgagtgatgcttgcttttcttttttttttagacgtactttcacttttgtagcccagggtgaagtgcaaaggtaggatctcagctcaccgcaatctccgcctcctgggttcaagcgattctcctgcctcagcctcctgagtagctgggactacaggcgcccgccaccacacctggctaatttttgtatctttagtagagacagggtttctccatgttagtcaggctggtcttgaacttctgacctcaggtgatccgcttgccttggcctcccaaagtgctaggattacaggcatgagccgctgcacccagtgcttttttttttttttttttttgatcattaaaaagtagatctattctgaccagatgcagtgactcacgcctgtaatcccagcacgtggggaggctgaggcggacagatcacttgaggccaggagtttgagaccagcctggccaacatggtgaaatcccgtctctactaaaaatacaaaacttagctgggcatggtggcgcatgcctatagtcccaactacttaggaggctgaggcactaagaattgcttgaacccaagaagcagaggttgcagtgagccaagactgtacttcagcagggacaacagagggagaccctgtctcaaaaaaaaaaaaaagtctaatctatttttatttattcttgccagtagaaaaaaataaaattaacttctactacatagtgcttcctattaaattttggcacaaaagcattttaaatgttggactgaaatgcacttttgctattgctaggacttgctccttacctagttttagatcctctccacagtttgctcttggggctcctttgctgccacttttaagttgtgtgatcctcccatgtatctaggttgtcatgaaaggggaggaggtgcggtccaagttttggtttgagagttgaatcaaaattttccaaacagagaagaatacatgtatgtgaggaggtaagagagggacaggatgactggttaagagcattctaggctcagggatcagcattagtaaggtcaggaaagcgtgaagcaatatgttcaatagccgccagcagtttggtgttgttgggttggttggagtaagagaacctatcctaggtcttcgactactgttagtactagttctactactactattgttagtactgctagtactagtagaactagctaatagaactagtactagtagtagtcgaagagctagggtaggttcttctactactaggcgaactagggcagctgttgggtccagatcctccagggcctagcatggcgaccaggctatcggtcttagatttttccctgtaagttatgtgttatgaaagacatcacacagggacttctcctgccacttagagctggagtagcctctgccaacccagtcatagtggaatggaactatgaaactagccaaaggcacataaagcctttagtcaagactcttggttgcaagtaacagaaagccaactaaagacagtgtaagaagagaaaaaggagtttattagttcatggcattgaaaaaagtccaggggtttctaactttgaggacagctgcaacagggaacttaaataatttcatcaggattgtttctttctccatctgtagactctgttttcttctgtgttgacctaattcctaggcagattcttatgtcatggccaagatgtctgccagaagatccagatttatattctaaccatatgaataaccccagaggaaggagaattctacttttctagggatgacagccagatgccaggattggctcttgtcagctcagcttggagtttgtgcttattttctgtggacattcatcatggttttgggcaacttagtgttctcaaatactcttcctatttagggggcagtgggatgcttacctatccaagggaacagccagacactgtctgtccaggcctcccttgcagccaagatacagtcatgtgacatagactctgccaataagacccacatgtggcttcaatttggaaaagagccatgtgaggaagcaggcagcatggaagatccatttttcagtgaccagtgatggcatctgactttagggaaaacaactgctgagtctctgatgtttgctccccaacatcaacagctttcactctgggttctcatccagtggaagcagcagttaggctttgctggaacaatcttgaggttggaaatctcactctggtccatccgagagctttactaaatcactttttgctctcaacttgctagagtgactaactacgactctggacagatctgccatccctgaattcgtcaccatggccgtgtcttgctcattttcccagccctgaaattactgcagagtcagtcttgcgaaaccatgcagctgagaagtaggggaagggtgatgccctgaaggaaaattgagatgctcaaggggcgatcaatgctgagcatgtaaaagcaacagatgtccacctctccctttcttttaaggactctcatcagcctcctgtgaccttaatgggctggcacactccttaatctacagtgtgcttctaatagattttctttcaaaacctaaattatccctccttaccatctcctccagggactttgggctcctttaactggaggtagaaagaagtttactgcacagcacagtctggggacagagggtgtgcatgccattaaatttctttgctatctccctccaagagttggctgctgtttgcacataatagtaagacggaaggattattagggaaatttggtcaccctagctgtggcatagtgcaaagaaacatgggagagaagaaagaaacttggggtaagccatagttctgctgatctctaactattcaagaaggacgttgctcattctggaaccttcatatccgacctatgaatgtgctagactgggtgactccgttccaggttagctgtaatggatcaaggaatcctaaaggggaattaaagggctcagaagcaaaactattggtactctagtgacatctggtggttatcctgaatttaaaacctctgactatttttttgatgtctgattttgtttcattgcattctatcaagaatattgattatgctatagaatggccaagatttgttggcttcttttatttgtgctgtgtttttctatccactagactctgtccctgggcaataagctttcagtggaaattaatcggtttgacttttttctagaattttataccttatgagttagtggtttatcataacctaagaggtcatctttttttttttttttcttgagacatggtgtcattctgtcacccaggctggagtgcagtggtgcaatcatggcttggctcactgcagccttgacctgctaggcttggatgatcctcctacctcagcctccagagtagctgggactacagacatgcaccaccatacctggctgatttttttgcttttttttttttttatatatagagatggggtttcaccatatttcccaggctggtcttgaactcctggacttgagcaattgactcaccttggcctcaaaaagtgctgggattacaggcatgagccaccatgcttggcctaagaggtcatacccttattagttgtagctaaaaaggcttccagatgcattaacttcttttgctttcctttagaactctatgaacaagaatgcaacggagagactgtggtctactgggaagtgaagtacccttttcccatgtccaacagagacgtatcctttccacaaggtactcattccctggccctctaagtgtttctgtgttcctcagctgcagtctattgcagagaggtagagctggtttctcagcaggcacagataacattgtctctgattcttgcagcagcatttgctaaagatattgcttcttgtatggtgtttggagagctcagagtgtgatttctgggcccaaccacatgaagtgtctgtaattttggtcactggagagcagctcttactttcctaagaagtttcctaggccttgaaattgtcaggccacagaattggggatctggaaggaacttcttataaaaagtgcttgttacagctccctcagtctacagaaggaaaaagggctcccaaagaggtgataggacagaggcacataggtggttagtggcagagcaggtgctggaactcaggcctctgcatttccagctctctccgcctcccccatctcagtagaccccacagaaatccctccttgattgttggctctggacactgactgtaagcttcttcccctcaatgtccttgtttatgaaatgaagcagttgaatgaaatgtagggaggcttggctggcactgtaaggtcttcagaagcccccttaggactaagctggggggctaggatggaattttgggggtgggtaggatggaagtaggatgactcctaggtaagattttgactccttcaccatgctcttcaatcccagcagcggagtgttttacaggttcaatttccatgtaagatccttttagcaaagggtctcttggagtcaaaaaaaagtttggaagccactgaattagatgaactgccaacacttcaaaggtgttctgccaaattttaatcactatatcaagataattcttcctccgtggagtatcagatgatatctatcacatgagctgagaaagttgggggagagagtggaacaatatttgctaaaaggaaaaagtaaaaggtgtaggagaaaggaacccagtgacaaatcaacatctctttcctgaaacatttaagaactttacttattagtgtataagagcatggagcaatagactgtccaatgtgagggtggggcaacagggggcgctgtcaagacactgaggtgggactgaacgcgggtggctcacgcctgtaatcccaacactttgggagtccaaagtgggcagatcacttgatgtcagagttcgagatcagcctggccaacatggagaaaccctgtctctattaaaaatacaaaaaaatttagctgggtgtggtgggcgcctgcaatcccagctactccggaggctgaggtgggaggatcacttgaacccaggaggtggaggttgcagtgagccgagatcgtgacactctactccagtctgggtgagactctgtctcaaaaaaaaaaaaaaaaaagacactgaggtgggtggaggctgagacggctgccatgttatagtaagtgtaattgtgttgtgcgtagtgactttttgattattttaggtttttgattcctttgagtgggaaacccaaaattctgttttatgaaagtgtaactaacaaactaaatatctgagctccatccaactatgaaattctaagtaggttttggagccagatctgggataaaaattcatgtttcatcacttcagctgggatgtgggatttttggcaaggttcttttcctctctgagcctcacttttgtcatctgtagtatggggatactcataccaaactcacagggtctttgtaaggatccaaatttaagctgtatgtcaagtgcatgatgttacatgataaaggctcgataagtagtgattcctgttgtttcatagactttcattatcctccctagaatagtgccgtaaacttaagggttcttctgtcaaggctgatggacatgaaatggttttgttattcttggtaaactagtgttagcccagagaggacatctgcctacgaaatattcatgtagtcccatgtcttcctatggtcatcagctgtaacattgcttgaccatttactatgcataaaggtcagtaattagagcattgggtgaggccagaacaaagaggaatgacaccattgtctgtcgagtgcttactctgcccaggtctttctctaatgcccccaccaagcctgtctgcaaggcagtgttactccctttcctacatagggaatctgagtctcagcaaggctgagtagcttacctaggaccacacagctgttaagtgaccattcctctgtcatctcccagtgccttcttggagaaaggaaatgtggtttcctcacataattaaaagcatgaagggatcactcacaggtaagtaatacatgctctttggtgagaatactaggtggtgtgaggcacagtcttgcagtgcaggtatggagacagggcacgtcagtgaactagtggtagaaaggagcaaatgccaagtgggaggcacagaatcacctccctttgcttccagcttgtggcgctttccttctgtctgtctacaatgctggcgttggtgtcttgccttaactggctatgcagtatgtctaccttcggcagcggcgagacctggacatggaagggaggaagatccatgtgatcctggcccggagcacctccatgcctcagcttggcgagaggtctggggtgatccgggtgaagcaatacaagcagagcctggcgatcgagagtgacggcaagaaggggagcaaaggtaaaacccatggtgcctgtcagtgcacccagccaggggtcccccacgggagggccaggctgatggggggacatgtcgagtacatgaagcgtatccctgaaggtcagaggacaggcaaagctgcagagcaaaccaggatcagcacctagagagagcctcattccaccccaacaaacttgagtagagtatgaggttgatgtttaactctgacccagtctattttctccagactcatggattgtccagatgaaaccagaccattataagtaagccagagagtttagaaagtcacttccagctggtcctgtggatacatacgctgggcctaagggtaggcaagaaagctggcaggtttgtcttggaggtctcagctctggctcagtaccaactcagagctactcaagacctgcccagcttgagtttcagcccccagggaggaaagctgcagacagagagtggggtgcgaggccacctgctctaccagaatgagtgtggccttgagtcctaggcaaaaatctgaactatagttagatggtcaccttgaatatgtcacctaatttttatgagtatctgtttcatcagttataaaatgggattaattttaccatctccttaggattgctagaataattgaatgagaggctatattcaagtgtccagcacttgccaggtatttaataaatagcagcaaaatgtgtctatggctgttttcaaaagtgcctatatttaagtatgccataagggcagtcaatggagagaagtccatctgaattatatgctacctccctctgcagtttctgagcttgaatatgaagatataaagtttgcacagttttgttgctatatttttctggtatttttcctttttctgaattgtcctttctttccctctctagttttcatgtattacttcgataacccgggtggccaaattccgtcctggctcattaactgggccgccaaggtgagatcccaggaggtggggcggggggagggatgggggagtgtgtttgacaaatgttgacttagcccgcggggctgtcaggctgaagagacacattgtctcaggcgtaatgaggctcttttatgaagagtttggttgagtgactctggttagggctggggctgccaacatccaagacggaggctgggacaagagacaaagaattgtcagcttggaatgccagcctctccctgcttgtgccccaggaccccgccagaatcactctctggaacttctggacaatagtctgctcttagtaggaacaatagtgcctttggagcctatattcctctgcttactggggaataagacagactgacctggcttggagacaaccagatgtgtccaagcctgaggaaagcttccacttttgttgttgttgcccttttttttttttctttttctctataagggagggaactgcagtggtagtttgtatcactagagactgcccaggagcctggcattatggggaccatcagcctgctttgcacaagatctactactagagagctcaacagattccttggaagagtgaaaaagcacatcaactttggagtcaaacagacgcaatttcaaatcctggctctgctactgactgtcttgttttatttaaggaagccatgcatttcttcctttttaaaaatgaagatagatgtcttctactgcatagagggggagtaaataagacaatatttaggaaaagtcttgcccagtgctcaacattaactaaataataatatatcctgctccttgatccccaatccttaccattttctaattcagtaaagcaagtgctttcatttctttggaagaatgtaacaatccagcccaagcccatttcttgtgttttcttttttccagaaacactgtttcagaaacatcttcgctttttcctagaaaaagctaacatataaggcctttttgcaacagaagttcctgttgactggtcttacttttgtcctcagtcctactttttgtcatcatctgcaacaacattctgttgaaatccagttagggagcctattcatttttgttcgtcctaaagccaacattgtttaccttctgccacatcccaaagaatcaagagtgaccactgtgaagacatagaaatgacagtctcatttcctttgcagaatggagttcctaacttcttgaaagacatggcaagagcctgtcagaactacctcaagaaaacctaagaaagagaactgggaacattgcatccatgggttgatgtctctggaagtgcaaccacccaatgtctctggaagtgccacctggaagtgccacctggaagtgtctctggaagagcacccaccactgttcagccttcccctgctgtttctgtcttcagaggcctacacactaccacatcctttctaagcatgtttgcctgacatccagctcactcgtctgcttcctttctcgctccccccatcctgggctgggctgccttcttctacagttcaatatggggcagactagggaaacctttgcttgcttactattaggaggggaagtcttcagtagggaacacgatcattccattgtgcaattttacggggatgggtgggcggagggacacaacaaaatttaagaatgactatttgggcgggctggctcttttgcagcttgtgatttcttccagcttgggaggggctgctggaagtggcatttcgttcagagctgactttcagtgcacccaaactggatgacgtgccaatgtccatttgccttatgctttgtggagctgattaggctgggatttgaggtgataatccagtaagtctttcctcgttcctacttgtggaggatcagtagctgttatgatgccagaccatttggagaagtatcagaggcctgaccggacacataatatgacaaccacatttttcctcatcatccatgaggaaatggatgatttctcttttccatatgtcactgggggaaaggctgcctgtacctctcaagctttgcattttactggaaactgaggcgtcaagatggctgtggcagctagcaaaagcaaagatgctttgtgcatagccttgtgaaaaagtatctttctatgcaataagatgaattttcctcccagaatatttagaaatgtagaagggataacagttcacagccaggtaaaatttaactggtggcttaatgactctgcacctttttctcaggaattctgcctaagttgtctgccttttctaccaccaaaaagacttttagttttctatgctttctcctgaattttggtagggtaaggtatttctatgtcaaaggcacagccttgatgatctcagggaaaaattttaatcactgtgtataatgatactgaaccttgattaataacagaaattcaggatgtaaagccacagaatgggatttattaatgtgggatacctcagactgtttgttttctttctgggaagaaaagtgtgttctataatgaataaatatagagtggtttttacttgtcctgtgtaccacttccttcctaccttcttccttttgtgagtgtgcatcagttagatctcctttatttgcaagtgatattcagcctaatttgtagacttaaacataaaacataattttgggcttacttatatgcatgatcaggtgtaggtatcttcatgtagggatcaatacaggtgctcaaactgagattagaattcagatcgtttagtattggtctgcatttcctggtagcattgtcgctaacagcaataggtaggtttgcatcttcctaggctcatgccaagcaaaacaaaaaagacaatgtttctttctagtaggacctgcactttccataacttagagcacctctaaaacatatgcttatctatgccctgctcattatggtcatctggatagaattatacaagtaagtgaatgcctcataaaattatcattaaaatatcattatcaataatgtagctgaaatctattctagataaactaaatctgaatacttcctgttaatagaagtcaagttgaaatcttatgaatagattatttgaaataaaagcactgagattatagtcactgaaagagaattggcatgaaatggtgtcatgtaaaccatttctttaaataacattaaataatttgctaagaactctgaaaatactaagaatgctgagtttctaggtaaggtacttattttaaaaggttacagtgtttgctgtaatgaatggagttaagactttttagcatttttacttgctaatttagagtagtggacagtcctcacgagctgaggttatgtaggaaactgaaaactcttgagctatagtaagtgccaaagtcaaaaaaaaaaaaaaaaaatagaactggtggtttaggcctttacttagagggacttgcacctgagttctcagggtgtgtttttctgcagcagctggatgtatcacttggaatttgtaagttatattgtcattcctctagcactttgttttacttatttttcccatatctgtgtttccaagtagacaaccagcatttgtggatagaagcagttatatcactttgattactggtccttggggtagtatatagtaggcactcgaatggtgactaaatgagtgaatgaatgatttagagaagattgaccaaatggcatgaacctggaagactaaatccattcagctatagaggctcaatccccatggattcaagccaaattattccccaagtcagcgttttgtggggtgcggggtgggcggtttctagatttcccaggttcccattggtccttccttgaagtaccaaggtcctctctctgttaaggggtggctttgctggtgtggctatgggttatagtataatgttagagaaatggcacagtttgaattgagtccggctgagattagtcaggattccagttgaaatttaatggcaaaagtagcactactgttggtggtaaattttttccacaggcaaattattcacactgcataacaattcaaagttaatgaccaccttggaaccgaggagttccagcagagggtcacttcccttgaaaatgttcctatttcacagcaagagtcctggcctgactccctggctgagattcctcacccagaatccccatctataatgcctgcccttccaacctcccacttcctagctggacttgcaagagatgaggcaggaagagccccattcagttctcacatttctagtggcaccacccagtcacctcagagaattatctttaaatgcatcgagacatttagttctttaacagatatttctcaagaggctggagtccatcagcattgggataggcatggcatttgtgggatgaatgagaaagatatggtgcctgcccttaaggtgcttatggtctaatgaaaactcagtgaataagctgctgaaggatgataagtgctcagaaaaggaaaataaaaggtgctgtcaaaaaaagggcagtaaccaagtttgaggagcagaggagaacatgttggaattgtggctggatgaaggttgcagaagaaagctgttcatgacagaagaaccatttgcacaaaacctctaaggaggaaggactcagcaggagagtcagtcacatgtgaagaatgacagaaggccagtgtggctggagcgctgacatgaaggagaggcatcttgtatgtggctggagaagtagacaagccatgtagggtcctgagagcaatggcaaggatttgggactttatcccaagagtctcaataagctttgaaagatttgagattgaggagtgacctaaaaatatgtattattcttaacaccattcatttttctccatgattccccagcatctctgacagcctctccagtagcattgtgtggggctactcaaggtgctttaagccctattactttgaatcctctccattgtgaggcagcatgcagagtagcccatacttaaatcaagtttccaaagtggaacatcagcttctgaagtttaactgaaaaacaaaaggctggagggaggggaccacccatgcacatcccctctgtctctattggcccatgttggggcgcagcataccctcccacacatctgcatcatgcagcccatcagagcagagccatttaaggggccagaagtgggagagaaaaaatgaaaggcaaaaaaatgtaagcaggtccactttccccaagttccttttttttatattcatccttaactgcaaggaagaacttttttttttttttttgcttgagaagacagaagcataacatattgtttgtttaggttgcagagtttagaaccaacaaaatgggaggacttcagaaaaattatttacattgctcatctatttatatatgtgtatgtccatgtgtgtctctttggatacacataatagatgctgcatttcataagatataataatggaacaacaattaaacagtacactatgtaagtacactatgtaaactttctaagtttcctgtgtgatatgccaggcccactgccaggcagtggagtacataaaggtgggatgcagtgactttagaattagtagacaacagatcctgtaggacaatgagcagtttgctacaagctcttaaagtattacattttccttccatccgatggtggttgcatcctttctgattattataaacacttgtgcacatattccatgtcctctgcagactgctataattcctgaatggaagaatctgccccacattcatgtagtccactgcttagcaatggacctggcatgacatgtagaaaacttggagtcactcatatagcatactgcttagttgttgtgttattgtatcttatgattgcaaagtcagtgcattttagctgagtgcacagccacccagccacccttgcagtaaagtgtggccatggtatgtaattctggccaatatcatatgagcataaataatatgtgccacttccagctcaggatcttaaaaggaaaaggtatgaactcagcttgttcttgcctccttcaccatgtctgggaaatgatgagaactggaacaaatgccctggaatcaaggatgaaagcctaggattaaggatgacaaaataactctgcctcccttggactgttacaagagagagaaatagacttctttcttatttaagccacagcatgtaaaaaaaaaaaaaaaaatagcagctttgcctataccaactcatgaatagctcaaaaagagtgtccctttggaccaggagatcaggaaccagctcaaatcctcctcatctatagactttggatctcctggcctgtgccaaacaataagtgatctgcaaatttctgacttgttccagtttcatttaatgtgatcaataaatgttggctgttattagctgttactcccaattgtacatctctatctgcctcccgttctcctgccccatgctttgcctcaggctactctttttgtctatgttggaaatcttccccaacttttgtgaaatttctgtcaaaattgaaggcttactataaatctattccctctaagatattccttggatttagaaaaaacttaatctatgatggtgctgaataaatgaaatccagcaccttcagattggagctacttctatgaatcacctttgatagacactgtattagtccaggttctccagataaacaaaaccatcaggatatacaccttgtcatgcaccacatcatgatgtttcagtcaacaacagactgcattccaattcataccactaactaaaaacaaataaacaaaataaactaaaaaccccaacaatatgtatggcagtggtgccataagattataatcctatatttttaatgcacctttttaagctacactaatacataccattgagtactgaatactgtaggcaattaaaacatgtacaggtttgtagcctaggaaaacgggttactccatatagcctatttttgtagtaggctataccatctaggtttgtgtaagtatacactatgatgtttgcacaatgaccaaatcacctgacacatttctcagtatgtattctgttgttaaacagcacctgattgtgtgtgtgtgtgtgtgtgtgtacatgtatgtgtggaattatggaattggctcatacaattatggaggccgagaagtcccaaaaccttcagttggcaagctggagacccaggagacctcatgatatagttccagtccaaaagctggcaagctggaaagtcaaataaattatgtttcagttcaagtctgaaggccagaaacaccagtatctcagctcaaagcagtcaggcaggaggcattgccccttcctcagaagagggtcagcctttttgttcgattcaggctttcagctgactggatgagaacctcctatattggggacagccatcagctactcaattcaaacattaatcttatcctcaaacacccctacagtcacactcagaataatgttttaccaaatatctggacagcccatagcctagtcaagttgacacataagattaaacattatacttggtgagagcccagtgttctcagataaggaaaaagatttaacattttgaagctcttattgtgtgcgaggcactagattggatgctttacttacagcttagtctttgatgagataggaaatactatctccaacttactgatgatgaatataggctcagagaggctaaataatgtgcttaaggtaacttggctagttaggtggtagactgggaactcaaagctaggcttctttgatcctagatcccatgcttccacattccccctcacattccaacacttttaatcttccttctgttccatcaatgtgccaagcttgtttttacatcagtcattgtaccagttgtcctctctgcccagagtgccctgctccctgatccacacaagcctgaaatctttaaatcatgcaagtcgttgtttaaatgtcccctcctctgagaagttttgcagttgaagtcaatccctattccttaccttgtctgcatagcatgtaatactttctattaaatgtatttattttctgttcatttatttcagctccaaaagggtacagaactttgtctcattcccaaattatatactcaatagatagagcacaaaaatattctaaagtatctgctgaaggaataaatgaatcaatggtggggcaacaagctcaaagtcccatgatctcaatttgaccaataatgcctgaaagataggtccaaaaaaaaatgtattctcaatcttgtgttccacctaatttttaccaaagagggaacactgaggacaaatttttagttcttttttttaaagctagaattgctttgttttccagggttttgttctttattaatttttttgatttttcattctgatttaacaccgttggagagctcatactagccccgtaaaagtctactcaacagaatgatattactgatgtaacttagggaagggagagaggctggaggcaaaacagggctagaagagaagatcttttcatttgcaggccagaatcctgaaagaagaaaacctgtatcccccatggacagatatggggaggggactgtgggtggaaggacagcacgccgaattcattttctctaatctatcttatccaattcctctctagtggttcataaactgagaaaaagtcaatggaaaccaatcaggacaaaaacagcacttagaactccatgcagggcatacagcaacttttgttttatgtcaaacagcttatgaggggctggatctgcttttaagtggtcatggattctgcttaccagtgaatgtggtggttcattttccaagggagagtgaatgatattcttcatggggagcctatattttaggcctggtattgaataattactggactgctgaaagcttccaagtaggagttcgcccttcactacacagtttggctcatgttcccatttcggctactttaagctgttgtaaacagcattcgttttccattacaagctaggaaatgtgacttcagcgacggtgccgagtccctggagagcgcctgccagggaggccgtttcctcacctctcattttagtttgtaacttgatggcgaggttgagtaatcgctgaagctccatgtcttcccatcctattctgttccactaacttataaaacagccagtgacccgcttgaggactagcggatcaaccagatgtttcctgagcaaagacagcatgcgtttcctcttgcacatcatcttgtgagaggggagggctggcgggccactcaccccgtctgacatcattgggcgaggtggcctgggggagaatttcaaagcagagcagcttggccagggaagagctcagctggcagctgtgagctgggattaactgacccagataactagggagaaggaattggcaatctaagtgtttgttctccagcaggaagtagacggcctcctttctactccctaaatatctgtggctgtaggagaccttcccccaatggctccacatacacagtcaggattgcgtccaccatatttcttcccatcccaactttttgttgtccctggcttttgcataaggttgacatggcacaagctcaaccaattgcagtgtaataataataacaaccataataataataatatcaatgaattattcttccctaaacaacattgaggaagtcaaattctaaacaatctgatttcaaataatctccttatagatcactagcttgtcagacttggggtattaagaaccagtaaaataaaatatttttcataatacagggagcagctgacatgtaattgtcagcttccccatagaaaggtcattaaaaataagacaaataaaaagtaaatccaatataccatttaccatcactatgatttcataaaagaaaggtttaacctcttctgctgtaatgcatccaaagtcttttctttatacttataatcaaatccaaactactgagacctaaaaaattccatattacttacgatctggcccatgcctgctcttcaagctccacttcctccttgacttattcctctctagtcttttatctgttcctcaaacatacagtggtctttgcatttactgtccccaacatctggaatgctcttccccacatctgtatatagcacactgcctatggtatgcagctttctgacacggctcccaataatccccacatctgtatattcacttctttgtgtaatgccctcctctgtatgtggagtggacctggtgacttgcctctaaagaatagagcaagagtgatgggatgttacatccaagattaaattgtaaaatactctgccttcgtccattcttgctcactttctctgtctggattgtctcacttgctttctctcatgaagcaagttgctaattatgagtgtcctatggaaggtcaatgtgacaaggcctctggccaagagccaactagtagctgagaccctcagttcagcagtttgggaggaactaaatccttccaacagcctcctgagtgagattagaagaagatccttctcaatagagcttggcagtgactgcagcttcagaagacctcttgattgctgccctgtgagacaggctaagccagaggacttagctaagccaagacacactggaactgcaagataatactgttttaagccagtaagatctatgtagtgatagataactgaagcaatgcctcatttatttagatcttgctcaaatgttttcctctccaaagtcgtctctctctaaaacaaaccaaaccaaacaaaatgatcacacattattctctcacaccttacccagttttgttttttcttcatagcaattatcactacctacatttatatcacagatttatttgttagctatcttccctattagaatgaaaattcagtgaacaaaatatctgtccttttgctggtgaacaagatggacatgcatttgccctgatgatgcttcagtttatttgacaaatattgattatagggctactttgtaccaggctccatatttataggttatttgttcttggttctgttgtatctaggctaattaattttagtatattggttcagctgttttgttttaaatttagctcagctgctctttgataatgcacctttctgtatctttcagtgagtgtttgattaaaatgccatatgtgggctgggcacggtggctcatgcctgtaatcccaacactttggggggccgaggcaggcagatcacttgaggccaagagttcaagaccagcctggccaacatggcaaaaccccttctctaccaaaaagtacaaaaattagctaggcgtggtggcgcaggcctgtaatcccagctactcgggagctgaggcacgaaaataacttgaacccgggaggtagtggaggttgcagtgagccaagatcaccactgcactccagcctaggcgacagagcaagactctgtccccaaaataaaatagaataaaatagccatgtgtgatagagtcaagagtagagcttgtgtatactctgttgaagtccattgttgaatgaacataattatttgaaaagatacctaatgtaaatgatgagttaatgggtgcagcacaccaacatggcacatgtatacatatgtaacaaacttgcacgttgtgcacatgtaccctagaacttaaagtataattaaaaaaaaagaaaagttctcactttatgctatgctgacatctgcctatctgttactttcatctattgacctcagatttactgtcagaaataatatagaaagtgtctattctttttctcaaatccagttaaaattgttctgttaactctatctctttgggtgtaagttctatttatcaagtttattacctcttttgtgcaataggcttttcttggatgtttagtgtgtcttcattttgtggtcatcttgtgcagttaagattgcaagtttaactttctgcttatttgagagcagatctgagagctatcactgtggctccctctccaccgtttccaatgagagcaatggggctcctggtaccatcagccatgcttccagggataggatcctgcatcacctgtacctaggaattaccccatctttctgtctcaagctcccacattcatgagaaaatacatctcaaggcagattcatctgtttctggcatatgtgtgtatgtgtgtgcttgtgcatatgcatgtgtgagcatgtgtgtgtgtgtgtgtgtgtgtggtagactggttagttaacctggctaccttactgctctcatcagagaccccagaggtagactacctccgaacatcgatcgtcttcattgtttttctcatctttaagagctgcactttccaccaatgtcctaagctatagctttttctgcaattttatctcatgcgttttctgcttgtttctggaccacaaaatgtgaaaactcttatgttccaatccttgtgttttaattcttatgaatgtatttatacatgcgtttgtgtgtgtagtaatattttatattttttaagtatataaaatatgaatatatatatatattttttgagatggagtcttgctctgtcacccaggctggagtgcggtggcatgaaatcagctcactgcaaacttcacctcctgggttcaagcaattatccctgcctcagcctcctgagtagctgggattacaggcacacgccaccatacccggtgaatttttgtatttttagtaaatactgggtttcaccatgttttccaggctggccttgagctcctgacctcaagcaatccactggcctcggcctctcaaagtgctgggattacaggcatgagccaccacacccggccgtgaatatatttctgttttatatcaatatgtgtatgtttttataggtcatcttatctaccatcttgaagccattatctccactgtcttttcgatcagtcagcacgtcagatatttaaagataattaccacattctccattgttgtttcctcctcagtctaaacatcctcagttcctttaatgatcataatgtacaataattttctgaccccttatcccctaaaattcccttctctattcttctcggcacatagcatttattcaacagcactgtcatataatatggccctcagagttgagagggacactcagagtacaatgggactgttactgcttgtactctctctctatttttctatcaatgctgtctaagtctggtttatccttttaaaaccacatatttatactactggattgtaataaccaatttcctttctacctctcttccgaattttatatatctaaactctgccaagcaacaggttccttattctgtacttgtgtaattgattaccaaccaaaatgaaggacttcacactagttcttaatgatttgtaccatgctaactttaacctctccacatccttttgtagtgtgtgtcagaatatgcatcaaggcaagtttcagtttattcttgtctttaacaaactgacaagcctctgatatattgatctctggtgaattgtggttccttccttctatggaacaccttctcctatgttactaactgattagagaccatattattggcttctttagccaaaccccatatttacttatggggattatgttatttatttactcaacaaagatttatcaagggctaactctgtgccatgaaccaagttgggcattggctattcagagataaataaacatcatctttgacctcatggaacttatgatccagtatttacatatttataattatgtatagacttattatacttatgattgctagtgattatatagtcagaattttactgaaaaaaattgccaatctcgataaagcaaatatagcaaaatgttcattactgaattaaggtgatggggtatccaggtgttcactgtatgattctgtcaacttttctgtatatctgaaatttttcatgctaaaatgttcgggggaaatttgcctgtccctcatgagctatatttcttttatagtcctcagctatgcaatggtacttgtctttcttttaaactctttggattgttttacttgctttttatgaacttcaggataccctcacctttttctcccagggttcctggaagaaattgtgacatagtagaaagaatacagacattggagatgagctaggactcaaattttgagcctggcacctactggcttcctgcctctggataagtcatttaatgtatttgagcctcgatttttcttattcctaaaatggagtaattatattcacactttgttgtgaaaattaagtaaaattatgtatgtaatcacttggcatatttaaaatgcacccttccccacttccatgactttatccatctatctacctcacacatcaccattatttcctttcttacaaatcagaattaagtggtgagtacccatttatgcttttctctttcctctttgaaaaataaaattctcagaaactcagatccttaatgtgttattggatagttttgtttagcaaatatggtatcagaagatatgaattcatccataaccttcaagtttcctttttgttcagatacaggattaatgttaggaaagtaccattaatatcctgactaagtgatcagtaattgctgttaagttgtaaacgctttattgccaattcctgtcttgatttagtaggtttatgtggtctgtgtcctaattgctgtgtctgcaatgttatctcctttcttccatttttgcgaaaatcctgtgcatcctttgagaacaagttcaatgctctatcctcctgtgaaggcttcctaaatcccttccttcaggtcttactcaaaatattctcactgcaccgtgttatgtcttaaaatatctcacataaggaccagatggattcacagccgaattctaccagaggtacaaggaggaactggtaccattccttctgaaactgttccaatcagtagaaaaagagggaatcctccctaactcattttatgatgccagcatcatcctgataccaaaaccgggcagagacacaaccaaaaaagagaattttagaccaatatccttgatgaacattgatgcaaaaatcctcaataaaatactggcaaaccgaatccagcagcacatcaaaaagcttatccaccatgatcaagtgggcttcatccctgggatgcaagcctggttcaatatatgaaaatcaataaatgtaatccagcatataaacagaaccaaagacaaaaaccacatgattatctcaatagatgcagaaaaggccttggacaaaattcagcaacccttcatgctaaaaactctcaataaattaggtattgatggcatgtatctcaaaataataagagctatctgtgacaaacccacagccaatatcatactgaatgggcaaaaactggaagcattccctttgaaaactggcacaagacaggaatgccctctctcaccactcctattcaacatagtgttggaagttctggccagggcaattaggcaggagaaggaaataaagggtattcaattaggaaaagcagaagtcaaattgtccctgtttgcaaacgacatgattgtatatctagaaaaccccattgtctcagcccaaaatctccttaagctgataagcaacttcagcaaagtctcaggatacaaaatcaatgtacaaaaatcacaagcattcttatacaccaacaacagacaaacagagagccaaatcatgagtgaactcccattcacaattgcttcaaagagaataaaatacctaggaatccaacttacaagggatgtgaaggacctcttcaaggagaactacaaaccactgctcgaggaaataaaagaggatacaaacaaatggaagaacattccatgcacatgggtaggaagaatcaatatcgtgaaaatggccatactgcccaaggtaatttacagattcaatgccatccccatcaagctaccaatgactttcttcacagaattggaaaaaactactttaaagttcatatggaaccaaaaaagggcccgcatcaccaagtcaatcctaagccaaaagaacaaagctggaggcatcacgctacctgacttcaaactgtactacaaggctacagtaaccaaaacagcatgatactggtaccaaaacagagatatagatcaacggaacagaacagagccctcagaaataacgccgcatatctacaactatctgatctttgacaaacctgagaaaaacaagcaatggggaaaggattccctatttaataaatggtgctgggaaaactgactagccatatgtagaaagctgaaactggatcccttccttacaccttatacaaaaatcaattcaagatggattaaagacgtaaacgttagacctaaaaccataaaaaccctagaagaaaacctaggcattaccattcaggacacaggcatgggcaaggacttcatgtctaaaacaccaacagcaatggcaacaaaagccaaaattgacaaatgggatctaattaaactaaagagcttctgcacagcaaaagaaactaccatcagagtgaacaggcaacctacaaaatgggagaaaattttcgcaacctactcatctgacaaagggctaatatccagaatctacaatgaactccaacaaatttacaagaaaaaaacaaacaaccccatcaaaaagtgggcaaaggacatgaacagacacttctcaaaagaagacatttatgcagccaaaaaacacatgaaaaaatgctcaccatcactggccatcagagaaatgcaaatcaaaaccacaatgagataccatctcacaccagttagaatggcaatcattaaaaagtcaggaaacaacaggtgctggagaggatgtgaagaaataggaacacttttacactgttggtgggattgtaaactagttcaaccattgtggaagtcagtgtggcgattcctcagaaatctagaactagaaataccatttgacccagccatcccattactgggtatatacccaaaggactataaatcatgctgctataaagacacatgcacacatatgtttattgtggcattattcacaatagcaaagacttggaaccaacccaaatgtccaacagtgatagactggcttaggaaaatgtggcacatatacaccatggaatactatgcagccataaaaaatgatgagttcatgtcctttgtagggacatggatgaaattggaaatcatcattctcagtaaactatcacaagaacaaaaaaccaaacaccgcatattctcactcataggtgggaattgagcaatgagaacacatggacacaggaaggggaacctcacactctggggactgttgtggggtggggggaggggggagggttagcattgggagatatacctaatgctagatgacgagttagtgggtgcagcacaccagcatggcacatgtatacatatgtaactaacctgcacattgtgcacatgtaccctaaaacttaaagtataataataataaataaaaaaaagaaaaaaaaaagaaaaaaccacacatactcatatttctaaacactttctcaaagtttgaaaaggagggaatgtagctactgaaatattaaaagtaagaaggattcacactacatcttttgatacaaaataaattctccacagaaaaataaaataaaataaaataaaatatctcacataacttaccattagatagtaagaactgtgcggccagaaaaaagaactttttaacctttctatccctagtgtatgggactagaagcagtcagcaggtacttcttagagataattcgtggatacctggggaggtgagtgattagagttaattatccctgggcctcagtttcttcctccaggaaataaaataggtcaccaggtgacttcaaaagcctatgtaagtaagcagtgaaattttatgattcttagcctttctattatgttactcactcacatgcagtatacctttttcatttcaagtatttgtcttaatgtcagagctttatgtatggatctggaggttcttaatttttaagcaatagagatggatgctcatacattccctctctgactctttgctctgattttctcaatggctttgcaccaagggtatggatgagttccccaacaaatcatagttccccaacatatactccagtccaaacaaacaaaaacgcatctccccatgcccttcaacctcaccctgccatcccctccattttgcagatcacctattttagaacatctcttctgtcctgtgtcccaactctctgaaaaaggctgagtagattcacatatcctggagtctggtgggtgtctagattaatattaagaagatgctggcctctgagtcttagacccttttatccttcagcatatgctgagtttgagttgctggaagatatttgattctaaccttccatatttgtgagcctcatctgattattctggacagtcagaaacacttggggaggatgagggggcatgttagggaggtgcaggacctcacattttcacccctgtttcctaaccctttaaatttcaacaatgctgaacatacttaatgttccgaattctctgcactctcactcaccccgtttccctccacttaacacactcttcaaatcttctctaccttttttgcctgataaagctgattcatcatctgaggctcaattgaaaaccacttcctacagagagagttttctgattctcctactacaactcttactaaactgtttggtgattgtctgattatttacatgatttcttcatttaatggatgccatcattcttgttcattattgtagccctagagcttagcacacagtacctgaaacacgatagttgcttaacttgtctctattgaataaattaataaaggcggtagtcgctgctctcattaaagaaattaaaatactatagaatgcacaagataagcacacaaataaccaatatattgatgcctctcattttacaactcccaaggatcctgtggagatagcattgtttctaccattttgcagaaagaaaaatgtagccttagaagttatatcaatcatcaagttattttacagctagaaagtagcggaattgaatttgaatgcccgccttcacagtagaagttaagtgttctctccataatattgcaacaatatgcaatgactgttgcaaaattggtacaaaagttggctgcattgcagaaatgagagagttactcctagatgacatttaagcttagatctgaaagacagtaacttgttttaaaaaatattttcaattgccagaacaaaaccaacctccttttttgcatcataataaattaaaccaatacagccatatttaatgtaagaagtgaaagctcattcccctcttgctctaattacattcccaagacataaccatcataaagcctatctatatacatgatatggtggttttatgttatttaaatgaaatcatactctaaatgtccaatagtcttcttctttttttttaagtcagtataacttggacaaccttatatggagtatatttatatttacctcctgatttttagctgctacatttcattcctttgtaagaatgttctaaaatttgtttaacccgtctcttgttatgggcatttgggtgtttttttttaaattttctcccttataaataattctataagaattctccttgtatatacatctctgagtcctcattaaagattttctgtccatcaattcctaaaataggaattcttaagttatgggttatatgcaatttaaattataaaagaagctgacagaattgcacagaatgtgaaaaacttgaaattagagggcaaaaacattcaaggtggaacaagtcacataaataaaggcacctaaaagcataagtcacattcttttatttttcccaagaagtttccgcattttgaccctttgtgtgagctctaacgacaaattccagctcctgccaagagaccacaagctatttgtcagtttgtctttttattctccttcttgtcccttcagtgatgaagtccccagaggttaaacactctcattattaatcttaccacaagaatcccagaaaaccaatgtttgctgccctttggttctttattttaatgactcctcaccacacacagaccccttattgtgctattcacaactttccagatgaaaccaaaggcttgattcaactgtagtcaaagaaaatgaattctacccaattccacacacatacacacactaaccctcctcttttcaccagtgcctaaaacttaaaattgaatgaacatgacatgagatgtttctaaagagctatccccctgccatcagttttattaaaggcataaatgtgcagtcgcatttaatggtgtttattttgaaacatgtgatgtttacccttgaaagcctattatgcatctctcaccttacagtgaacaaaagggcattgtaacttcacgtagtctgactgcttgcttaaatttaggtctgcactcaaacgagaaaaatacttgagtatcagtcatcttggaatccaagggacttattcatagagcatgtggggctctattcataaatgatttatgtctttgcataaaggggagtgggggttgcatgtgttgcccagagaaccatcgtctgcctttcctgggtaatttatacaagatcaatatttatcaaggtgagccaagaattgtgccgtaactctctgagagccaaatacttcatttacagtttcttcacccatggaagggagcgtgacagattgaaatgtttgcataaaagctacttaaagaggttctcacttgattcctgttgctttaaatgtggcgtgatgccttgcaagaaattgcagatttcactcatagatgttgctcattgactaacacatagtagatattaaaaaatgtacttgttgaattagtgactaaagggaaataaacaatcataatagaaatattactattctcaaagagaaagactgattgcccactttgtttattctgtcagtaaatattaattgagcatccattaggcattttgcattgaataaagtcacagttattacctgggatgatccctatacatatgtgtgaaaactttaaaacatgttaatgaaatatatgctctattaaaggttcaaaaaagtgttctggtgatagagatgaaggatcaactaattctgcacagaggcgtctaggaaaggataagtgtaagtaggagttaaacagaaagtgaatgaggatgggaatttttgggagaagtaatagtacgaattaaggcagcatgaaagacctttggattgcaggaatgagataaatatgttgccatcagagattagagtactgtgtcagtaataataaataaatctgaaaatttctcttagaactggattgtgaaaggcataatacactcaactagtgagctattagtttattttgtaagcaagaagagactctcataaatttttaaacatggacattacatggttggatttctcatagggatatatctctggtagcacagtctatactatttaccatctggtggagatgaaagagaggagatgacaagttggtgtaaatttgtttatgtctggtagtgtctctttggagtactgttttgagaacgattttaaaacttcatctggactcattgggaaaggcttcaatctaaagaaatgatgcctaccatgagtgtaagaaggaaagcagggaaagcgtcagcagacatagctaagcatttgccatccctggattagcaggacattgggaaggtctagatgagatatcattagtctttaattaggacaacttcaatgtatgggagatgataggtgtaggtttatatatgattatgatctcctgtgcacatatgacttgatgaattatgtgcagtttaaaatagaatagaggatgactttctgaagcttgtagtttaagacagatcttgagaaaagcaaccataattaattaagatggggaaaagtaaatcaacagtggtaaagaggaaaaaaagattatttctgtatgatttttacacataatgagtgtaaaaatgtcacaaaatgtttgtagcatgagtttgaatcccagagaatgctctgaaatgaagatttaaacctgggatttatctgaatataggcaacatgtctcatagttcaaggataatattactgaaggagaagtccaatggaacaccagcattcaaataatggatagtagaaaaggaagatccatgcagatgacttcacatttccagaaagaatatttccaatttgagaaaaacgtaaaattcgaccctctacctttcattatcacacagaaaaacaaaagggatttccattcctgactatgataactagctagcatctgagcagctatcctgcagagaataactggaaaagctagattcaatttttaaaaatgtgctttaaagtttgggagatttacaaagaaagcgataacttgaggggctaaaaggagaggtgcagagatatgaacctagtgttaaggctttgtatttcctcttgagatttttgtgaatttataagtgaaggcaaaaaagccaagagaaagcagagctcatacattctcatggggctatgaaggaaaatgtggaatttagaacctgccaaagataaatgtctggtaaataccacaggatttctgttggtaccagggttaatactggtaagaggcaaatgaggcatgtatggcacaaaattttaggaggcacttactcattaaatcatgtgccctaggtggcttacttgcctcatgttagtcctgactcacactgggatacctggaaggttgtctacaactacagaaaaactggaaatagatcactctttataaagactagcgctaaaagagatggagtcagaattgtattgagacctgcctctagtataactgcctgagagaaacaaaactgagtcctctctggaggaagaaaatgttatccagaaactcaaattattgctacacttcttttttgacacaatgccttcaataaaaatttaccaggcatgcaaggatatgaggtctagttattaaaaagcaaaaataaaagaagaataaaagcagacaagagtgccagactggtaggagatccagatactaaatttataagacacaaacttttaaaaaactgggattcatatgtccaaaatattaaataaaaagatggaaaactttagctgggaatcagactgtattaaaaaaacaaataaactcatagacctgaaaaaataaaactgaagttaagaactcattatatgagcctaacagattaaacacaagtgaagtgagacttactgaatgtaaaaatgtcagttggaaatatacagatagaataataaaaagaagaatagaaaatgtagaaaagggtctaagagatatatgggacaacataaaaatgtctaaactgcaatctcataagagtgaagagggataatatagcagaagcaatgtttgaaaagattgtggctgaacagcttatacaatcgttgaaggacattagttacagcttcaaaaagtgttacaaacaccaagcaaaacaaacaaacaaaaatccttccaaaaaaccataaagaaactcatatttaaattcatcacagtaattactgatgaaatgaaagaaaatatgaagggcaaccaaaggaaaaaaagatatgttagcattaacgaaagaatcctaaaagttacagctaacttataagaaattataaaaaccaggagacaattgaatgacattttcaaaatactgaaagaataaaaaactaccagcctagacttctatacccagaaaaatattcttcaaaaatattggcataataaagacatatttagaaaatgcaaactgagggaatttattagcaacagagttatagtacataaaatactaaaagaagatatttgtatagaagaacaatgattccagatgaaaaaagaaaaatgcagaaaataatgaagaacaacataaagattacatttgtgcttaaatgtaaatgagtattgactgtataaaacaacaacagtaatgttatataaggtttacaatatctgtgtcattaaaataagtgaaaaccctagcataaaagacagcaagggtaaatattttttaattgtttgcattgtcttgcaagtaataaaaatatatatttatgttaaatattaataaaatatttatgtttgaatctcaaggatatacattaaagaatttgtaaaaggattagtaagctaatggggggggaatgcaataataaagaatgctggactaatgcaacagcagctagagaggagagaaaaaggacatagaaattgatttaatgccaaatatatcaataatatcctgaaatgtaagtgtgttaactattcaaacagacaaagatttttagatgaaaagagaagcacaactatttgctgcttaaaagagacataatttaaatgcaaaaaggttaaaagtaaaaatgtacagaaagatagcataacctttttcatctttgttggtttaaagtttgctttatcagaggctaggattgcagtccctgcttttttttctttttctttctttttttttttttcgctttccatttgcttggtaaatattcctccatccctttgttttgagcctatgtgtgtgtttgcacatgagatgggtctcctgaatacagcacaccaatgggtcttgactctttatgcaatttgccagtctgtgtcttttaattggggcatttagcctatttacatttaaggttaatattgttatgtgtgaatttgatcctgtcattatgatgctagctagttattttgcacattagttgatgcagtttcttcatagtgttgatggtctttacaatttggtatgttttgcagtggctggtaccagtttttcctttccatatttagtgcttccttcaggagctcttgtaaagcaggcctggtggtgacaaaatctctcagcatttgcttgtctgtaaaggattttatttctccttcacttatgaagcttagtttggctggatatgaaattctggtttgaaaattcctttgtttaagaatcttgaatattggcttccattctcttctggcttgtagggtttctgctgagagatctgctgttagtctgatgggcttccctttgtgggtaacctaaactttctctctggctgcccttaacattttttccttcatttcaaccttggtgaatctgatgattatatgtcttggggttgcttttctcgaggagtatctttgcggtgttctctgtatttcctgaatttgaatattggcctgtcttgctagactggggaagttctcctggataatatcctgcagagtgttttccaacttggttccattctccccatcactttcaggtacaccaatcaaatgggggtttggtcttttcacatagtcccatatttctcagaggttttgtttgttccttttcattcttttttctgtaatcttggtttcaaactttatttcattaagctgatcttcaatctctggtatcctttcttctgcttgatcgattcagctattgatacttgtgtgtgcttcatggagttcttgtgctgtgtttttcatctgcatcaggtcatttaagttcttctctaaactggttattctagttagcaattcctctaatcttttttcaagattcctagcttccttgcattgggttagaacatgctcctttagctcagaggagtttgttattacccaccttctgaagcctacttctgtaaattcatcaaactcattctccatccagttttgttcccttgctggtgaggagttgtgatcctttggaggagaagaggcattctttgtaataaatagctcttattatgttgagaaacatttcatcaaaacctagtttatggaatgttcagcctttttgcactgtttttttcctcatctttgtggatttatctacttttggtctttgaagttggtgaccttcaataggatttctgtgtggacatctttttttttatgttgatgctattcctttccgtttgttagttttccttctaacagtctgggccctctgctgcaggtctgctggagtttgctggagatccactccagaccctgtttgcctgggtatcaccagtggagtctgcagaatagcaaagattactgcctgttccttcctctggaagcttcgtcccagaggggcacccaccagataccagctggaactctcctgtatgaagtgtctgttgacccctgctgggaggtgtctcccagtctggaggcacagggatcagggacctacttgatgcattacataatggtaaaaggatcaaagcaacaagaagagctaactaacctaaatatatatgcacccaatacaggagcacccagatgtataaagcaaattcttagagaactgcaaagagacttagactcccacacaatgacagtgggagactgtaataccccactgtcaatattagacagatcagtgtggcagaaaattaataatgatatccaggacttgaactcagctctggaccaagtggacctaatagacatctacaaaactctccactccaaatcaacagaatatacattcttctcagcaccacatcacacttattctaaaactgaccgcataattggaagtaaaacactcctcagcaaatgtaaaagaacggaaatcataacaaacagtctctcagaccacagtgcaatcaaattagaactcaggattaagaaactcactcaaaagcacagaactacatggaaactgaacaacctgctcctgaatgacttctaggtaaataacgatattaagtcagaaataaataagttacttgaaaccaatgagaacaaagacacaatgtaccagaatctctgggacacagctaaagcagtgtttaaagggaaatttatagcactaaatgcccacaggagaaagtgggcaagatctaagattgacaccctgacatcacaattgaaagaacaagagaagcaagagcaaacaaattcaaaagctagcagaagacaagaaataactaagatcagagcagaactgagggagatagagacatgaaaaacccttcaaaaaaatcagtgaatccaggagctggttttttgaaaagattaacaaaatagatagatggctagccagactaataaggaataaaagagagaagaatcaaatagacacaataaaaaatgataaaggggatatcaccactgatcccacagaaatacaaactaccattacagaatactataaacacctctacacaaataaactagaaaatctagaagaaatggatgaattcctggacacatacacactcccaagactaaaccaggaaaatgttaaatccctgaatagaccaataacaagttctgaaattgaggtagtaagtaatagcctaccaaccaaaaaaagctcaggaccagatggattaacagccaaatcctaccagaggcataaagaggagctggtaccatttcttctgaaactattccaaacaatacaaaaagagggactcctccctaactcattttatgaggccagcatcatcctgataccaaaacctcgcagagacagaacaacaacaacaaaaaactttcaagccaatatctctaatgaacatagatgtgaaaatcctcaataaaatactggcaaaccaaatccagcagcacatcaaaaggcttatccaccatggtcaagtcggctttatccctgggatgcaaggctggttcaacatatgcaaatcaataaatgtaatccatcacataaaaccaatgacaaaaaccacatgataatgtcaacagatgtgtaataggactttgataacattcaacaccctttcatgctaaaaactctcaataaactaggttttgatgaaatgtttctcaacataataagagctatttatgacaaacccacagccaatatcatactgaatgggcaaaaactggaagcattccctttgaaaactggcacaagacaaggatgccctctctcaccactcctattcaacatagtattggaagttctgaccagggcaatcaggcaagagaaagacataaaaggtattcaaataggaagtcaaattgtctctatttgcagatagcatgattgtatattaagcaaaccccatcgtctcagccccaaatctccttaagctgataagcaacttcagcaaagtctcaggatacaaaatcaatgggcaaaaatcacaagcattcctgtacaacaataatagacaaacagagagccaaatcatgagtgaattcccattcacaattgctacaaagagaataaaatactgaggaatacaacttacaagggatttgaaggaccacatcaaggagaactacaaaccactgctcaaggaaataagagaggacataaacaaatggaaaaacattccatggtcatggataagaagaatcaatattgtgaaaatggccatactgcccaaaggaatttatagaggtaatgctatctccatcaagctaccattgactttctctacaaaattagaaaaaactactttaagtttcatatggaaacaaaaaagagcccatatagccaagacaatcgtaagccaaaagaacgaagctgaaggcatcacactacttgacttcaaactatactacaagactacagtaaccaaaacagcatggtcctggtaccaaaacagatatttagaccaatggaacagaacagaggcctcagaaatagtgccacacatctacaaccatctgatctttgacaaacctgagaaaaacaagcaatggggaaaggattccctatttagtaaatggtgctgggaaaactggctagccatatgcagaaaactgaaagtagaccccttccttataccgtatacaaaaattaactcaacatggattaaagacttacatgtaaaacccaaaaccataaaaaccctggaagaatacctaggcaatatcattcaggacataggcatgggcaaaggcttcatgactaaaacaccaaaagcaattgcaacaaaagccaaaattgacaaatggatctaattaaactaaagagcttctgcagagcaaaaaaaaaaaaaccaggatcagagtaaacaggcaaccgacagaatgggagaaaatttttgcaatctacccatctgacaaaggtctaatatccagaatctacaaggaacttaaacaaatttacaagaaaaaaacaaccccatcaaaaagtcagcaaagtatatgaacagacacttctcaaaagaagacatttatgcagccaacaaacatatgaaaaaaagatcatcatcactggtcattagagaaatgcaaatcagaaaccacaattatcaaaaccatctcactccagatagaatggcgatcattaaaaagtcaggaaacaacagatgctggaggggatgtggagaaataggaatgcttttacactgttgatgggagtgtaaattagttcaacaattgtggaagacagtgtggcaattcctcaaagatctagaaccagaaatgccatttgatccagcaatcccattactgggtatatgcccaaaggattataaatcattctactataaagacacatgcgcatgtatatttattgcagcactatccacaatagcaaagacttgggaccaatccaaatgcccataaatgatagactggataaagaaaatgtgacacatacacaccatggaatactatgcagccataaaaaggatgagttcctgtcctttgcagggaaatggatgaagctggaaaccatcattcttagcaaattaacacaagaacagaaaaccaagcaccacgtcttctcacttataagtgggagttgaacaatgagaacacatgggcatagggagaggaacgtcacacactggagcctgtcacagggtgggggactaggggagggatagcattaggagaaatagttaatgtagatgacgggttgatgggtgcagcaaaccaccatggcatgtgtatacttatgtaacataccacacgttctgcccatgtatcccagaacttaaaatttaataaaaaaaattgaaaagatggcataactacagtaatatcatacaaaatagatttaaggtgaaattattaatatgggtttttttaaaaaaacattttatagcagtaaaggggtcaattcaccagaaaggtagaacaaccatgcatttgtatgcacccagtaagatcactttaaatttgtaaagcaaaaattgatagaatcaggtgaaatagacaagcccagaattattgtggggaacttcttgttttgttttgctttaagcaactgaatttggggatgggttgttttacatcaatagataaacagaagtatacatctcctcattatcaaactattttcctcgtttctttttaaactattttattttagattcaggggtttatgtgtttttttcttacatgagtatattgcataatgggtgaggaatgggcttctaatatacccattacccaatagtgaacactgtacccagtaggcaatttttcaaccttgtcctccttcccaccttcccccattttgtagtccccagtgtctatttttccatctttatgtccatgtgtacccattgtttacttcccacttataagtgagaacattcagtatttgatgtctctgagttagttcatgtaggataatgtcttccagcaccatccatgttgctgcaaaggacatgatgtcattctttttatggctgcatagtattccgtgtgtgtagacacacacacatatatgtatatatatacatatatatacacacacatatatatgataggagattttaatgtacctctgacagaaggtgaaaaacaagaagacaaaacacacatttagtaagaatacagatctacacaataccatttaaaaatgtgtatccatttggcaccagatttgactctcttcccattgctgggagtagttcctcatattgtacctattaaatcttttggaagagaattttgttttatttggccctgcttttgaagtagggtatgagaactccagttatggtctctctctctcaatctgtatgtgtgtgtgtgtgtgtgtgtgtgtgtgtgtttgactttagagaaatctctttggcctcatttttggtgagagtgatacatcctaaagaatgaaaacatttttattcttctccaagtgatgggaaacaggctaatacagggtgggttctccttacctccttagaaagataaataacttgccaagtgcttaagttattttccaaagggtcttaagtcctttaaaatgggccatggatcacagagtcctattattagaaaatagaagtataggcaagcaagaaaaacagaaagagaggggatctagactcaaaatttggagatctgggtttcatatttgagagtgatcctctacagagagtgccagagcaataaaccaggagaaggactttatgacagtggtgtgctggaggtactggttcttactggcttgcaagaaactgttgtgtgtatatcttcccaaatccaagttcagtaccattacgttggtggcttaaatgtatataatgtggtagaagtatttatatcagagaaattggcaaatggtacaaaacaagactgtgtgttggggaagctagtttttaaacatttatgaattcatagccagaaaattaccactgaatttaccctctgaaaataccatctgaatataggactagaataagactgccaggtaggaaacaacatcctaccctaggatgatgaccctccttgataacttgagaattctctcaagtttcaagtgaacatctgtacaactaatgagggcagtgtgaggaattaaggaaggaagtctcccagttaaacctcggtactggacaggaacatgctaatacctgctgagttttagatgggagtgtagacatcactattacagtgtttgtgtttgtgtaagtatttatacaagattgtgtcttccatttcatatatattacagaacaggaaaatgttgtcagcttcatcatgaaaaagaggtttttggaagagacagagatttctcaattgagacctgagaagacttgacttttatattgctaagtttcacacaggtcatggatgagtgctaatctgctaatgactcagactgcatttgatgcaatgttccctgtatcaaaaatgaaacttatatagatgtatagaaaaacaaagtaaatcagaacatgtgaagaatgagggagacagtgatggtgatggtggaagtttccttctgatttccagaattctcctttgatgcagaagttaggccataatagtcttcagaaatgaactattaatgatagtctagtctttacagcagtaaaaccatgttgataggttatgggatttctttctttatcatcaccatgactgcttcttggaaaccactgagttggcagcagctgtgttcattaaaggctgagttctcagaagtgtttataaaactaaacaacccatagatttctactggcagaagctagtcattggcattctatgtcttagttgctattcctttttcacatgcggcttggcaagactgacatatgtatcagaatcatatgtacaattttagttaaacatggactctccttccgtccttcccatctcctttgggcacaaagagaatttttagatccttatttttctccctattcataggtttaagagaacattgccttatataaaacagtaaatctctgactgataccccactctttttgatgaattgtgctgtagaatatttgatagaccttcttgttaaagctttaatatgaagtcaataattaatcaagtaatcaatatatagttggcctttataagtgccaacaccatggtctgaagattggtgaaatatgtttgctttttcactttaagtcaactttcagcattttcagggttaagactctagagcaacttgagtcgagactaccatggaattcacaataattctcttgaattcaatctattacatttgaaaattatatttgaatctcccccagatataaatgcttctaatttttttggtacaaagcattttcacattcattatcttattataaccctctaaaattctaagggcaaataaagtagatattagcgataatgataattactgcgttggtgaaaataatgcttttaataatgatgataatgatggtggtgactacaatttaaatgcctcctaggtcccaagtcttgtgatagctttatatatattatatcatttaatcctctgaacaacaacctgaggtagagtacctcaactcaaatatatgaagtgatttgtcaaaggtcacatagcttataaatattagaccaaggtttggaacccaagtcttcaagtcttctgggccaagttatttgtaatctatgaattgccaaatgcaatgcataaaatgcctttacaactccataggatggttgacgcacctcacctccctcagaacttggattaacttcacattctctgagaagcattctctaccacttatcagccatctgattttaagcaaattatttgacatgagtttactcatccataaaaaggaggtaactcatccatgttggctcagtctttgctgcaaagatccaataacttaaccaaaaggctagaaaagtctggcaaataatatgcatttattaggttgtggttcacctttccacactggccactggccttcttatgctttattgcaattatgagaagcacatgtggcaaaacaagggtcacatcaacccaaagcacacagagtttggatgttcgcacgttattcctaatcactcagattagcaagcaagtcgtactcttttctctctgtccaaagcttagcagcattacactggaccttaatcctgctgtaactaaggggcagtaatacgtcttaaagaaaaatctttaagagaaaggaaaactgaagaaccctggaaggtccatcctggaatgagccaaagctaacacttcctcaaaaaacaaaggaatttccttccccctcaaccccacccagcatattttatgtatagtttctaagaggtcagctaagaataatgggcttgagccaatcccgtattggccagctactctaaagtatttctcctcaatatctggtgaggcaatggtgttcaagaaacatctacacaatgcaaagtgagcaaaaaccagctaatcctaaatcctacatcagtagtcttctccaaccttggggtaaaaaagacatttttggccaaagactatgaagtaatgctctttattagcttacttcttctctgtgtccaaatgatataataaaattctgacatgaaaaaataatatttagaattttccctttatagtcttcaaaatagtggttgtcctcattgtctctccttctctcaaacaaaaaacaaaacacaaactctttataaatttagattgagttgacttatttttcctttatttgaaaagtttctttatatatgatattacatctattatctctctgtatactataccccttaaggtaagcagatgtcataatctctattttgtggatagggagggatgcttagaaaactttgtaacatattgatatctcagctagtaaattgtggaaccaggactggaacctacagcttctgacttgagattgtttgagattgtttccaaaatcagagcattctcagagtcttttttttttttttttggagacgaagtcttgctctgtcacccaggctggagtgcaatggcgcgatctcaactcactgcaacctccgcttcccgggttcaagcgattatcctgcctcagcctcctgagtagctgggattacaggtgtgggccaccatgcccagctaatttttgtatttttagtagagatggggtttcaccatgttggcccagatggtcttgatctcctgacctcatgactcgcccgcctcggcgtcccaaaatgctgggattacaggcatgagccaccacatctggccagagtgttcttattttgcttttgttgttactgtttttgcattttgtgtgtgtgttttctctatacacaccaagtacagagtttagctctgtaaaaacattgaaaacaaaacagcagaaaggactaaagctgttactattagaaatttaccttctagttggtagatacataacactgttcaaagcaggaagcaaagtcagtattactattatttttaagagacagggtctcactctttcacccaggctggagtgcagtggtgggatcatcactcactgcaacattaaactcccaggctcaaatgattctcctgcctcagcctccatagtagctgggaccacaggcatgcaccactatgttggctaatctttattttttgtagagacagggtctcactatgttgcccaggctggtcgcaaactcctggcctcaagtgatcctcctgccttggcttcccaaagcattgggattataggcttgagccatggtgcctggccgagcaaagtcaatgtagttaagtactgggaaggccgagcaaaccaatggtaaaatttggatgagagtcactggggaggtttctgggcctagctgaatatccacctacctataaaatctagagcccgggctttcccatctactgagactccaggggtagggggcttgtcccactgaattgtctgtgcttctaggaagctccttcattgtatgtgagcctaatgtgcttttattatcctctactgcctttatcacaggagtgaacctcatctactcgttgtccctaaaacataacagagcctctcactgtttacccatatccagttcatgagacttgtaggagctccctgtggatgtagtatttggaaaaaagattttggataactgtgtcaacctgttgggatgcttccctaagagtccactagaggaaaccatagtcaggagggaaattggggtttaaaatttaaacgcagaactatgtgttgagctaatggggcaacactaggataaaacaatagctgggcagtgagagttagtggcttaatgaccaggagaataaaagcaagaattgctgtatggagcaggagaaattaggcagtttaagccatcttaaaaccttggatttttcttttattgcagagttacacccaagctgccagagttctttaaagacatcaggggaggccggatagttgttccaagctattacccatctatagaatgcccttctctccctattaattacttcgatttctacattttctgcatggcctacctctaatattttcttctgcagagaattgttcttagccactcagactataggaatcatgctcagttgtcatatatttcaaacagttctgtgtcaccatttcctttgttacatacaaagtctttcctccaaatagaatataaaccagttatagagaggcaaaaacatgatgcctttcgaaaatcctaaaggccttagcaaatcaattattatcattatagcaaacacatatctagcacttactatgttctcttccaagcacttttcacatattatctcatttaatcctgacaaccaactatgcagtatttcctattgtcattttattttacatatgaggaaactgagtcctaggcagtgtaagagatagtcccaaggttactctgcttaaaacagagatctctcacccagaacaatttctcattggcaccttcactttgctcggctgccaaaaaagtagatattgacgtggaatctgaatacagcacctggctggagagcattgcctgtctgatgattcacacttttaaataaaaataataaaacccttggctggacagcttcacttccacagtccagctgggatgtcgtcactgtggttccaaaacacacttgggtgatatttcagcttgaataagtgtcatttgcacattcagttgtgaaaattctgcacggaggtcttgtgatcacactccttgtcaggcatctgccaaaagcttgctaatgttttggctcccttgtcctgctggtttttgctggaagtgacctagaggagcgtgggatgccttctcctttagttgaaacccaagttaaaatgggacaatctgggtgagtgacccaaacctgagtcctgattcaaccattatttactgagcactcagtatgtatcaagcattttcctgtattttattacattgaatcttcctggtagcgctctgaggtgggtgttgtgatctgtattttacagatgtggaagtagattcagatgtgaaagtaacttgccaaaggccattcagtgagtagaactaaagagatctgattccaggtttcctgccctcatctccatatcaaggtgcttctagttcactttgaggtgaataaagtaaagaatggaggggtaatataatagagatgataataataataattacaaacatcactaccaacatttcttaagtctgcactgtgtgccaagcactatgggaataccttacaggcatcacttcattttaccctcacaacacccataagaggtagtaggcactagtatttcccccatggtacaaagaaggaaaatgatgcttagagacgttaagcaggttagcaaatgatgtgccaagttttaagcccagacattctgttgccaaggcttgctacaacagctgtatgaaaacatgcaatgtgggagtgccagattagattcctcacctgccccatatcttcaaagaaagcaccaagagaaagtgtgaggtcaatgatttgaaaaaattaatcagactgtcaacatttccagtggagcccattcagccaaagtcaccattttcaacgttaacctccatgttgcaaggctgacttaggaacgttacactcacagactctgaggaagatgatggatttgttgagatggagcctcacctggcttggagccaggatgtccaggctaaatctgtgtcatttagtccttttcaccccatcttattgggagtaagctggaaagaaaattcgggtgctttgccaaggctttgggaattcacagccctgtcactcagagatgagaaggatcctttagttagaaaaagttctcagtcaccccttctggaagataatcagtgatgtgcctttccgcagtcatgagagttatcactcctccccacggggagagtgggcagtcacggtgaatcctggaaatgggagctgctcccagagtgattgagaacagaactgaactcagttcctcacttcttggtaccaaaggggttgggttgtgccttgcaaagggagagcaagaatgaaaagaagagtagaatgaggtttcgttttatatccagtaatcaacacaccaaattaaaaatgagcagggcagttttgtgtgtgcttgtgatttgttacactgttttcctttcctctcttatttaaaaaatgctatttaaacaatattataatgacattaaaagaagtacgttatttatttatttattttgagacagcaccttgctctgttatccaggctggggtgctgcggtggtgcgatctcggctcactgcaacctctgcctcccatgttcaagtgattctcctgcttcagcctcccgagtagttgggattacaggtgtgcaccaacatttttgtgttttcagtagagacaggtttttttgtgtttcagtagagacagctaatttttgtgttttcagtagagacagggtttcatcatgttggccaggcttgtctcgaactcctgatctcaggtgatttgcctgccttggcctcccaaggtgctgggattacagctgtgagccaccgtgcctggccagaagtttaataaagaaaatattcacattccacttgtagaatacagcatagtctttgctcgtgcatcatctattcttatgtaactgtaatcagacaatagagtgagcatttttccatgttgtcccatattccttaaaaatattccttgctgggcatggtggctcacgcctgtaatcctagaactttgggaggctgaggccagaggatctcttgagcccaggagttcaagaccagcctggacaatatagtgagaccttgtttttactaaaaataaaaacatagccggccatagtggcacatgcctgtggttccagctactcaagtggctgaggtgggaggatcacttgagcctgggaagtcaaggctgcagttatgagagattgagagatcgtgtcactgcactccagcctgggtgacagaggaaggaagaccctgtgtcaaaaaaaaaaaaaagaaaaattgtttcaaaagagaattcaatgcgtcgattacaaagcctattgcttctttcctttcttaattttgctgacactctgatattttaatctccattctagagtgtgagcttattcatatccattctagaggaaggaggaggtttgaaaatgaagggacatgcacatttgtctaccctgtcatgtgttaatggttcccattaataacaaaatagatgaggattagataagaggagaaacagaagaaaaaaagatcaaaagtgttcactaaaatgagttgtattctagttattttcaattttaggagaaccaaggtgaaaaaatgcactaaccagctgacaaacagctctgccctccggaggcttggcagacactgagcagctgctcctggggccaggcacctctggctgtgccagcagctgtgccaaggctgaacaaggtcggggggaaagaaatgcttcacatacctttggatttgtttagtcattgacgcaggaaataggtctgtgtcgctcagctggtagcatcattgcgtttgcctggaaggtcaagggttcaagaaccacactagaaagttggcagcttcccgaagccaatgcttgcactgtcatggaaggcaggtggtggtgaacactggagaaaggaatgctctctctgcatgtcccagggaaatggggctcacaggggcaagacagacacaacaccactcagtttactttgacccataagcttcaaagtactcctgtgtggaactagcagaactgtcatccaggggacaggattgtgtcatagacaactctagaagacaagcggagtttggggctctctgatgcatgctctaccatcttttttactgaaccctcagctcagcctctgtttcagctttgagaaactcagaaaccaagaacagtgaaaaattgtggcagatcctcaggaagaaaagaggcccacacttactgagtaaactaagcctggaattcaggtctacagcccagtagaataatctctttgtaaacttctctaaaatgcttatgtgcattgctgcttggaagttcaatgttatgcacaaaagcaatttactataatatttaagatatttaaattagtttaagagtttaaaaagcatgattatatttgaaattattgggaattatttatagtaaatacacttgataattttgcttttggctaaatattggaaatttggggaaataatccaaaaaatgatagtagagagggagttcagcaaaggtaaatgtggaaatacatcttttaaaattaatcaagcccactccgctaaaagatagatcacttaagcctgaaatacaatttatctgcctaaagaatttctatggcagcaggtgtggcctgaacaacagtgcacacctgagctgtttgtgcatggagtaacattttggcttacaagttaccacagggctaattgttgcttatttatttcgtgggctgctctgatcctagatacctttgtccctggaatgtgggagattgagtaggtgtggggatggtgctcttcggtaaaattgtctttagactggagaaggtacagtaacaggcagcttcttgttagtctaaaggaaaaaaatccctgactcctttcccctttaaataaaacaccttgcttgcaaccagctataagagaggtttgaggttggcttgcatcgggaacctgccaacaggttcaagtctgatgttcctactcccaggacatcttttgctgtcttatcatgagttttttatttattcagttattaggagctgtctttctgctcctaccctcagagacctaaacaagacctctcatcttttgaaaccaaagacagagtgaaacagtccccaaagaaaggaaatcctacaaagtctaatggaagttacacagttttggatttcccttggcatttcgtggtacctgtctctagtccttagtgctgtctacctgaaattactaacatttcctctcttcatgaggacaaggttcttcttctttaattttttaacagctttattgagatatcattcacatatctcacatacgattcacccatttaaagtatatgcttcaatggcttttattatattcacagacttgggcagccatcatcttaatcaattttataacattttcatgatcacccccaaagaaatcccaaatgttttagccaacattctccaatcctcctgtcttcccaggtctaggaaaccactaatgtaatttttgactctatgaaattgtctggatatttctctatgaaatattctggatatttcatacaaatggaatcaaggctctctttaagcatcctactattcttctacagagcctggccaaaaacctggtacctagtaggccttttagcaaggctatattagttacttgatttaggtatattaaatgactcttttaggatcaatatagctcatgagtgggtaactggatagtcctagatgaaagacctcatatgccattacccatggcgtgttaatggtctggacagtatcagaatgaaaagacagcctatgagtcatagcttcccctaggtgaggtcccacagacatggccccctgtactacttgtctgttcaatgatataacacggacgccatcagctcaacaaatcagaaatcgattccctagaagactggagttctcttataagttggcacaccacggtgtgtgttaacaggcaataacactaaaatgcactaaagaccatgtaatttattcccaacatgctgttattctttccaaaacattagctttggagcagaacgtttgctaaatgttgtctttatttccaaagcttggggtaaagatcatatgcaaccaatgactgagagataattggccactttacagttttaacctcaaatgaactcccccgtctgagtaaatttcctggtaaaagatcccattttaatagaatgtgaaagctgcaagaaagatggagcttacagatcacagtatggtctgttagataaatgaccaggagtaatatttcttaaaaccacattttgtagacagagttaacagaaaacccaggaaaaaaatacccagtggttcagcattctcgcttaaatgaaaatagcatgtgtgttttcagctcaagttgtgccagggcttggagggaaattggcaaggattaaaaccaagagtcttttgggggttgttgggtattgtcatcctggacctgacctcacagctttctctcttggaggagaaggcaaaaagtagctgtgctaaaactttgctctaagagttgccacagagtccagaaagttcctcttcttgcagttggcttattttcactgagctggcattgagccagaagtcaagttattattttgtttaatagctgaagaaatgaccatcttgtgctttttaacctaaaggtggccttgactgcagatccctggatgtggggaagcacctaagaaggtcagttcttccggtagaatgggagggtgctcctgctgtgcatttaaagtgaggtccttggtttcctcctttggattatcatctttggtgaggtttgccttatggagaactgatgactgtgagttgtcatgtacaaagtggaaaagtagctttattgtctgaagctcaaatttcacaggcttgcactccttggtttagaattcagattcctcagtttgaaagagaacaagaaaatgtcgcaccttttaatctatttgggcagaaagaaaatttaaatctagtcagagagggtatctgtctacaagagctcatcccaaagatttcaattagttattcaagaaaccatggctaagaacacactatgagccaggaactctcctgggtcctaggggttacagaggaaaactaaccatgactctaccttgaagggctcacagtttattggtgattggtcataggggagagggagagggagtaagacctaagtttggtgagtaccatgatacaggtatgtacaggatatgatgcagcacagcttggggtgggtcagaaagacttttcatgagaaacgaatccaaggttgggtctcaaagtaagaatagaagttagccaggcatctggaagttcacagttgcatgggggaggcagttggctgagatagagggaaaaagcacagaaacggagatcgcatgatgtgattcagcatgtcttgggtgggtaggcatgtattttttgaaagatgaggtcagagaagttggcagaggccagatcaatagcagccttgggttttaaacaagaccactttcctagctcctcctggctattccaacatggcaactggtgccctgagttctatctcagcatttgtcactgtgtgagtatcactcttttttgctctaagcagatagatcttgcagatctgtaaaaaattctggtttttccacttactatgtatgtaatcttggacaaactacttagctatgtggaggctctgttttctcttctgtaaaatgggtcaaacaaaaaacaacttcatagggttattgtgagtattactaggatcaaacaagaacaatgactggcatgagaaaaaagtggtcatgaaatatttgtggaattaaattgggtacaggagtgaaaaggaaattcttctgtctggaaaatagcctttagctttccaaacaccagtagctgccaaagcagtgtaggacacctggaaagaggtagaaaagagatccgaaccatgaagaagagtgacaggaagccacagaccccaaaactagaagatggtaagccagtgaagcagatcaaagtgggaggggtgcatcttgtgccagaacagcaagggcacggtcagaagggtggccaggagggaggaggtggcagatgctggctcacagggcacttcagggagtgaatgcatggcagcctgtggcttcctctttcctgatgttgtcctggtgtcctaccaggctctggaaagaaatcaaaaaaaaaaaaaaaaaaaaaaaaaaagaaaaggaaagaagagaggaaaaacgggaaaaagaaaacagcggcattgttgtttaataacagcgacaccccttcatgatagaaaacacataacaaactagaaatagaagggaacttccccaacctgctaaagggtgtttatgaacaaaccacagctaacatacttaattgtgaaaggctaaaagctttccccctaagatcagaaataagaccaaggtgtctgctcttaacactccttttcaaaattgtgctggaggctttagccagggtaattaggcaagaaaaagaaataaaagacattaagattggaaaggaaaaagcaaaactatctgaggatacataattttatatatagaaaaacaatattgaaaaagaagaacaaaattggaagatttgcagttcctgatataaaaatttactacaggccgggtgcagaggctcatgcctgtaatcctagcaatttgggaggctgaggtaggagagtgggaggatcattttagttcaggagttcaagaccagcctaggaaatatagggaatcccaaatccacaaaataaataaacaaaaaattagccaaccatggtagtgtgcatctgttgtcctggctacttgggaggctgaggtggtaggattgcttgagcccagaaggttgaggctgcagtgagctgtgatcattccactgcactaacagagtgagaccctgcctaaaaaaatagcttactacaaataacttgctacaaatctacagtaatcaagatggtgttgtactggcatgaggattgatatataaatcaatagaatagaattgaggatccagaaataaaccctctcaattacaataaattgattttccatgaaggagtatcaagaaaattcaatgggggaagaataatctttttcaacaaatggtactgagacaaccggatatccatatgcaaaagaatgaaattagatcacctgccaccgtatataaaaattaactcaaaatagatcaaagaccttaaatgtaggagctaaagctataaaattcttagaagaaaacataggggcaaatttttttatggatttgccaataatgtcttagatctagcaccaaaagcataagcaaaaaaataaacaaaatagataaatgtaactttattaaaattaataacttttgtgcttcaaaagaaaccataaagaaagtgacaagacaatgcacagaatgggagaaaatttctgcaaatcatatatctgataaggggcattcctgttgctataacaaaatactgaagagcaggtaatttatataagtaatagaaatctatttctcatagttctggaggctgggacattcaatatcaaggcactagcaaatctaggggctggtgagagctgctctgggcttccaaaatagtgccttgttattaggtcctcacatgatagaagggatgaaagggccaaggggatgaatagctccctcgaacctctttcatgaggtcattaatctcattcacgaggattctactctcataacttaatcacccctaaaggccctacatcttaatactatcacattggtgattagactttaacatatgaattttgaggaaacacattcaggctacagcagggcttgtatctaaaatacataaagaaatgatacaacaagagacaaaaacttaattaaaaaatggaaaataatctgaatagacatttctccaaagaagatatacaaatggccaataagtgcatacagtatgttcaacataattagcaatcagggatgtgcaaactaaaactgcagtgagatgccacttcacacccattaggatggctataatgaaaaagatgaataataacaagtgttggcaaggatatgaagaagttggagttctcatacactgctaaaaggaatgttaggcagtgcagccactttggaaaatacaaggcagttttttaaaatgttgaacacagaggtttaatgttcaaaaggttaacatttgactttgaaattctactcctaagtatagatacagaagaaataaaaacacaggtcaacacacaaacttgtacgtaaatgtccataggagcatttttcataataggcaaataatggaaatagtccaaatttccaatgactgatgattgaataaaacataatatatctgtacaatgaaatattatttggcaatgaagtactgatacatggtacaacatggaggaactttgaaaacattatgtcaaatgaaagaagtcattcacaaaggatcatatatcatttcatgtacgtgaaatgttcaggataggcaaatccatacaaagagtaaattagcagttgcttgggattaagaagaaatgggaagtgatgctaatggatatggagcttcttttgggggtgataaaatgttctaaaatttattgtaatgatggttgtacaactctgttatttactaaaaaccattaaattgtacacataaattggttcattgcatggcatgtgaattatatctcaataaagctgtcataaaaaccaacaatacaaatagctattgttaatttagcactttctaaatgctaggtactgtgctaaactatgtaatcttacctaagtctcataataaatatgccaggaaacttttagttttatttacaaagggaaaacatgagttcagagataaggaaattgcccaaggtcacaaaactagtaattaccatactagttaggattttaactcatttttgtctcattttgagtttcagggtcttacaaaatgccattagatggatcttgtgagcatccttgtgtacaaggctggggtgttcacaatagtgaccaacacgaaacagtagaaattagtgaaatctctgcctctgactttctcaccctggaactggggtgaggtgttggctcccaggcgctgtggatatggggtggcaaggaatctatcctcagtgaactgaattaattccttaattctccctcagatatgtcacagctgtcattctggaggtgagactcttgaccctccacccccagcacctgattttacagattatgtcttgcgtttgaaagtgagtcctgttactgttggctctgtctgcttcctagttccaagaaacaaaacgtgagaaggaaggtgttaagcccacaaaacaaagacgtcaaatagttctcaccaaggaacatttggatgagttttgggaaaatgactgtgaagcagatggattacattttctgtttgggctcagtaattaaggggaaagggggactcaagccaaatgtgctgggattttgtcaaattccaaatgttggaacacatttcaggatgtttgactgagtttggcagaatcagtaccttgactgtggccttctcttcttggacaaaagatgaccgaagagcctacaataatccaaacctgaaagaagccacaggcatggttacccttttgtgggaaatggcacaatggtaccctttgtcagttggaatatttcagtggggggattaaatatgcatatggctattcttgcagggtttttgagaaagaggataaaaatcagctcacataacacaatttaagaatatactctttcattctattcctcgtgatccagaggctagaagtagaattgcatccttccatgactatccaaaccccttattctgtgcatcctgaagtatccccaggaatttttgtggctgtacttactctcatcctttgctctttccatttgattctttagaatcagagcagaaccaagcgggaagctcagaatcagagagacctcatcaagtttttggcaaacccaaacattctgcaatagattgagtggaaggaagaggaaggacataaagataaagacatgagaaaagaagctgagtctttgttgaaacactgaaatgggtgcaggtatcatttcttatctcattgttttttctcataagccctgaattaattcatttattcacagtattttcgcagatgtgaaattcacatattattcacagatgtgttcactatcatctatgtactggaaagatagcagtgaataaaatggacaaaattacctgccctcttggagctcgcattctaatgaataaaatgccattgtcacttggaggatatgcttatcaaaatttttagaggtcagttgcctagctggtcaaagagcagtagaatttaaatttttctcctgtaagtagctacaatgctttgtcagaatttttaccctagtattacaaatatttattctattttgctgataaatttaaaaatggccttcagtgtcattccagatgggatatgttgtcttaccattgacagaatattctacacccaaagttaaaatttctaagaagaaaacacaattaagttcatcctttaaaacatttttttcaaatgactaaaaagtagcgactgggaagtgctgatattaaaatggcagcaaagcttccgcctcagagctctcctttcttctccctgtcttctcatcagcagatctttttttattcactgaagaagcaaaattggaaagtaaatatataaattagaaactggcaagagaagtaaacagcagtcttgggttttcacttcaaggcaaaacgatggctcctagtgtccccttctgcatgtcaatcttgtatatcaattccttgtgataggaaatgttattttcagtggactgtagtccaggcaattgtcaagagagctcctatgtggcaactgttttggacatgtccagagacacaactttttcaacactgcatcagccccagcctggctttcactgcttctgtatccctagctggtcacagctagctctgctgatgctccacagcttcaggcacagctccgcctgagctattcctgatggagatgaatagtgctgcataactccctattgcagactggtttcacattaggtctactgtctagacttgagacttaatggccccagatgtctgagggactcccacactccttgctgccaattagatctcagatctactggtggtattcatgaccataggggactaagttcgggtggtagctcccttcttttaccttcttcccatacattcactcagtccatagaatagaactgcaaacttgatgttctctttttaatccaaccaatcaacttgtctaatgcactagtcccaattctggagatcctagtttcagtgacccagttactgacctgggtcttcttgcttacaaagacctccgagagtgtacccacctgcctgttaaactggttaatttccaccaatctaagtgtaggtgccactaactagatgcaaatttttggtatagccatttctaaaatgaagatggaaacaggtacagccccaaagacagtaggcatgacctgacctcctgtacctttagagttattccttgttccatctcagtgcatgtctcaaattaattagtgcatgtctcaaattaattcctgctccattttacagcttgcctgataatactataggcaacaatgcaaagtatctaacatcaaagtctcaaacaatgataaattgtaattggaactacttcatggtgggagagaagcttttgttatcaacatttattaggcctgctggacctttagtaggtcactcggtccctgaacacagagataagtggacctgggtttcatatttagtctccttgcagaacaaatttagccttggagaagaccaaggctttgggcccaggaatggcctggaagttctctgggactaattcaaagcctcactaaactccctcttggaacatcttaggatccatagccacagattccttggtacacccaaagcacggtatagactttataacactgccagtcctttttaatgtttcaatctttttctttcatctttattctaatggtgccttgagaaaaaacagcattgagtatacaaatgaatttgggagtaagagagagggatctgggagaaaaaataaaagtgaagttcaaataaacttgtttggggaactaaatggctcttacgttaagaagagtgggctcatccccaccaggtgcacaaatttttttaatgtcttttcttgtttaagaaaaaaagtaatttgtccaaattaatgaccctttgtccaatatggagagtattagatacttgatcttttcttctatgtcgagggcatggctgaagtcttttaatccgagctctgagagcccagtgagaagttagttgtttgtagcttgagacatggaccattcttttccctttaaaattttgtgagtctctaagtcaacttcaaaataaggattgagaaaaactcaaggctgtctcagttttgtgttgagtgaatgcttgcttgaaatagagaagcaaaagaaaaacaaaggtaaaatgttttgatcattcaccaaattaagcgttagatgttactgccatctagtgatgatttaacacctggctgccaggggaaggtagagtcatctttttgctacataggcatcgccttagggcctatcacagacttgcaggtttgggaaaaaggtgacatctgagtaaacttccaaattaccagaggatggtactatggtgaaaaggtcccacaactgtgagaaaaatgcatgtattcgtattaaatcctaagcctctctgcccataatatttctttaaaaaaatcttccttgcaacaatgaaaacaggtttctcttaactccatgactccaggatccttaacgcatatttaaacattcacaggcaagttatatgccacctctccattgcatctgcctccaaaccctgtctctacacatcacttaatagagctccaatcccattcctcctcattctgactgcgctaattccaatcccatttctcctcattttcactgcactcatgtggtcactggaggtggggaagaggaagaagcaaagaagatgatactgtgcttaccttgtgtagatgctttacaatcatagttgccctcactatcatcccagaaatcggcatcattccagtgtgaaagatgagaaaatcaagaatcagaaaaattaggtaattggccagagatcacacagttaagtgtaagtagcaaagctggaatttgaacccagtgtacctggtctcatcatctgaggagtttttttgtggcttggtaagcacagtggtaggatgttggagaggaacactgaatgtggaacagtgggaaatgttctctgctcatcaaagggcagagttcaagaacatcctcatgtggcctcctctggagcaggtacagaaaagctgggaaggtacagaagtacttgagtgtaaaggcttagcaggttttggacgcacaagcaaatccatatctagagcagggttgccagaaacagatggtaactctagggtgctaatttcatccccttccctcatctgaagaaacgccatgcttcatgagagtatccatctccgaaggattaaaaagataagaaaaaaaaaaaaaagaaggtgatctgatctaagcctggcaccagcagtccccttaggtatatggaggaaagaacactgaagttggtgaaaaggatatagttcgggatttctgttgccttgggatttgggctacagccataacgctaaagacatgaggcaaagcgtatttagttttcttcattggcatcaaagaaccttcccagatgcctttgcagttagatggctcatgaaatcttggccaagttccggccaatggaaacgatgtaagcctgtctaggtttgggctctgagacatcctacgtgatccttcacatgctctttcttctttcccctgagggctacatgtggagtattcatagggtaattctgaatccaatttggagccttgaaaaattacttggtgcaaacactcttctctctccaacacacaccagcccctcattggactgggttgtgaataagaaaaatgccactaagattttttgtttgttgtttattatagcatttcatgtaatttaacctgttaatatacaacaacagatacaaaagatacctactgtggtaaacagccaaaaaaaaaaaaaaaatggccagaattctttattgctccttgtatccaagctcgttgcaatttgactttgcactttgtctcactagggaggcaaagtctatttccctgcactttgagtctgagctaacctgtgacttctttcatgcaagtagtagccgtgtgccacttaggagtctaggtctccagaggctttgcatgcttctgccactcatttagaatcctgctcagccccagtgacaacaagccttgacctgctggataaggagggacatgaggtcaagacaccccagccaaccaccagctaatgccatcctagttcaatgttcagccagcctcctgccactgaccacagctgaccactgaagcataagtaagctcagctaaattcagttaagcctggcccacagaaacaagaatgctcagctgatggcatggtgtgttttaatacttattatttacgctactggattttggggaagcttgttacacagcgttagctgaaacacctatattttaaaaagacctactgctcataacccagcaggacttactaagaggctagcagaacttgttttgttgttatcaacctaccacagtctccaaaattggaacattccccgttagaggagacatcactgggatcaggggttagaggggttagagcatcccatgttcctggtaagaacttactccattctgcctctctgggaaaagattacaggtgttttcttttttcagtgaaagtccaggctaattaagggaagcgctgagaaaaccacttgtagaaatcggtgggagtcagagagaggacctgcaggaattggggcttagcttatccctccctgacgagaagcttattaggatgcaggtcctgtaaaaccactgttactcccagcaaagcaagcatgatggagtagtttttgatagagctgaattttatgctatttgcgttcaagggtgtatattaatatagtgcctggtactgcttctcacttggaaaattttgaaggcaggaaactttctaggggcactctggggtgggaagcaaaggaacagaaaattggtatgctaaacccttctataactaattggagaagcaaggagctgtaagtttcctacgtgagaaaggaataggtaattggattggaacattttggcagaacagtgtctgtattagcctcctagggctgctgtaacaaagtactacaaattgggtggcttaaaacaacaacaatgtgttctctcacagttttgggggctgggcatctgaaaccgaggtgtcagcagggctgtattcccactgaatccttcagcagaggacccttgcctgcctcttccagtttctgcctgcacagacgttcccggcttgtggcagcatcactccaacctctgccttcatcttaatatggctgtcttccccctctgttctgtgctttcacatggcattctcttctctttgtatgtctatttccaaatctcctctttttatgacaccagtcattggattaggacccactctaatgacctcatcttaacttgatgacatctagaaaaactctgtttccaggtaaagtcacattcacaggtatggagattaggacttcaatgtgtctttgtgcgggggagggtgggaagcaatttaacccaaaacagtgcccaaaagggctggcttctgggtgatggagcccagtagtaagagctgtagacaatagcagaagatgggggagggggcaagatgagagcgtgcagcagtggcgggcctactgaaaagtgggcacgaatcactttaaggaaaccgatatttggacttctgcttcccaatgggcataacagccaagggagtgccggatatggccccagtcaggaaaaagagcttcttgctcctttccctcaagggcttcttcccagtcccccctacatgttaaaaacggaagagatgcagaaggagaaagtgtcccaggaacaaaggagcagacacctgtaataatcatcactgaggaccacagccatggggaaagctagcaccagagagagaagaggagacagtggggctgagttcaagatgagattgatagttaagccagactttgtgaaacctgagtggatatacaggttgagatttgcccaagatatgatcaagaggtgcagaaaggagcttcaaaggccaatatgtgaaaaaaaaaaaaaataaagacatacttacacttcacctagtgaatcagtttggtagaagagttataggtgttaaagtctaaactgtgtgatttttgtttgtttgtttgtttttgttgaggtggagccttgctctgtcacccaggctggagtgcaatggtgcgatctcggctcactgcaacctctgcctccccagttcaagcaattctgtctcagcttcttgagtagctgggactacaggtgaatgccaccacacccagctaatttttgtatttttagtagagatggggtttcaaactcctgacttcaggctgatctcaaactcctcacctcaggtgatccacctgccttggccttctgaagtgctgggattataagcttgagccactattcccagcctaaactgtgtgatcttgaccaatcttttaccacctctgagcctcaactacttcatctatacagtttggataataatttaaacacacacacacacacacacacacacacacaccctctacaagcttgtaaaagaactttctatgtttgaggtgctgttgtcactgagaccagaatccacagatggtggcttgtgtttccatgtttggttataggtatcagacaatgcattcagcttttctgagcttcagctttctcatttttaaaaaagggccatgagtcatggggcaaatggaaagatgaaatgagatgtgaaattgcttttttattttgcaaattgttttatatttgcaaagcatttcaggcatgtctcctatcgtctgtgtttttatgacaccaaatagcggcagcatgttgaattaaatgtaagaatttatattacttgaattctgttgatgagaatttgtaatgagcaatcaaccttgtacaatatgaaccccctggaaagctttaaaaatactaatgtctgggttccatccccagagatcgccacttaatcagtctgggctaaaaaacctgggcatcagggagatttttccaagctcccaggagatttgactgtgctgcggggtagggggaggtggtttgaaaaccgtagagtagaaagttctgctgctgtggctgaatgactgactgccacattgttatctgttttgtttttctgtttacctctgacaatttttaactgcactgcaatttttgttgatggactaggaacatgttgatttgggtgtgattttctggctagtcagcgatttttttttcttttagctttaggttttgccagttttgatcaactactttatcattttctgcttgctacacaaaaagtgtacctgtcaccttaaaaatgaaaattggttggtaaaattccacattctgacaggaaaaataacatcgtttttgtgaatctgaaagatggtttcctttccaccactggaacaactgcttttattttttaataatctgaggtatcttaggactgcaattacactgtagaaaaacacgtgacattaataaatcagaataattaaaacagtgcaaaacaaacacatttgtaagtgctgagcagagaaatacacagaaaaatgaatctttttagttgaggggttaggggagatggaggttgccatgatgaaatcagatttctgggagaaggcttagacatgcctgggagcacatgaagtggtgtcaggccggctgctgtgaggcagcagtataatagtcctgcaggagaaaaattagatttcagaggggtggctgaaaacatgaggtcaaaactgatacaaaggcagatttgttcctaacagaaaaccctcttgccagctgtcggcgccttctcttcctgccaggtttgcagggcaggggcagcagccttcttcccttttgcccaaataggagaagagcccattcaatcgattacgggctgtccaaagtgggctgagaccggagagcttttcttcttctcctcccactttccctccaaaagcagcaagggtgaaatgccaggtttaaaaagcgactcggtagctgacagttcttgtaatactcccagtctcagctgctctcctaactccagggtataattatccttgtacttaattggaggttcaggagagcttattagcttgctctgttgttgcataattcaggagttcagttcaaacttccttaaaagtgaagcaaaggcaccactttgtggtgcaagaagcaaggctggacaactgaggagggtcacacctggctccatgccctccctgttctgcggctaattcactgggtagcatcagccaaatagccaaccgctttgggcatcagcttccttccttgccaatgaggagacagacctgggttagtatttgcgaaagggtgttacctgaaacacttgcttttcaagaggcttctttaaaaaaagggttttgtgtccttaaataacttcagaaaatgttgtgtaccaggcatgcctgtggtgtatataatagattgtctcactcaatatctgttccaacgtcaagtttactacctaaaccctgtatttcccaaattcctttgcactagagtcccagatacgattaggctaccagtcaccacgcccggccaaacagacattttgccatcaaaacagaaacacccggctggacgtggtggctcacacctgtaatcccagcactttgggaggccaaggcaggcagatctcgaggtcaggatatcgagatcatcctggctaaaacagtgaaaccccgtctccactaacaaaaaattagctgggcgtggtggtgggcacctgtagtcccagctacttggaggctgaggcaagagaatggcatgaacccgggaggcagagcttgcagcgagccgagattgcaccactgcactccagcctgggcgacagaacgagactccatctcaaacaaacaaacaaacaacaacaacaacaaaaaacaaaaacagaaacacccaagcaagcttgagtttctgtctctcctttctgcacaccacaatagttctgtcactacgccgttggaagtatattttgaaagctcactctcaggtgaggatatgagatccttgagggcaagctctgtgtctcaattatctgtattccttagtacctagaatgctgattgcacaaagtatcatgctattattatttttactattttaatgtccagatacatccttcttctaaaatggctactgcctcaggacgtttgaagggggaaaagaagaagagaaatttctgctccaggaaggcttggaatgaagaacacagatagcaaattgttcttctctcctttcacctctactcccagtttttaaagtctctcacctgcaaactcattggtggtgttctttctttgcttgcagttcttacaaaggcaagaatgcctgaatatttggttgaaagagcatcgatggcttcaacctgagtgtgttttccaaattcatgcaatgtattatgcccctaggcctttgagagctgctgcatgtaatccctaatgctatggctgacacatgtgtctatcaaattgtgtcttgtctgagccttctgggcacaaaggaatattcccttgatcaatatgttcgatgggctaaaacaattttgctgaatatcaaatattgcctgtgttctgctaggccctggacattggagtatgatttacaacatcccatttttttgatcagcaccccaagctaagttgagggcttttggggctctaaatggttgcaaaaacttcagcacaattcagtgtaaatggtttaagagtttaaagagaccatccttctcctctggggcagtttcctcttggttcaacttttgtcatatgttccctgggaacactgcaaagtactgaatgcttcacactcaccgccactctgtccttcagaggggtgtggactgaggtggttagagatggtctttgaatgtgttcgcttaggaaatatcactcaggggagttgcaggagcaatatttgagcaacatcatagatgtgaggatattagagccaagagtgatctaagagataaaataattcaattattttatttgagagataagaaacttgagacccaatagacgttccacagcaagtatagatacagaagcaaagttctcaggcttggaatccagcatcttttctgaatacaacaagtaacctccaaaatttatacttttgaaggaacaatctgcaaagaaacttaaattatgccttctacatacttcctctgaatttctctaaaggcttttcaaaaatgaacaatttatccacagtgctggtccaaataagggaagtatcctcccacacaaagaaaagtttgtaagtgtttgcatgcactgcctggcacagtttcctcacccaatgccagacttcaaaattagtggttttcaaagtatgttccctagaccaacagcatcaaatcaccctgggaattgttagaaaggcaaacccttgtgtgcagatctaccaattcatacattcagaggtgttcctagatctctgtattttgcaagccttctaggtgactctcacgcatgctcaagtttgagaaccacttattaattttgaattctctttgcacaatgttatttagaagcaattggaatattctcatcccccgctgaaagaccttgcctcctgcctttttttgccgttccttagtttcatatccttggattaagacttctagctctagattatcctggactataaaacatgttgagccttcaaatccttcacatatcagtgtgtacaatcatatcagaaacttccttaatagcagattttgatagagtatatttataacatatttataacttatttatgtctgaagactgacttacaaaaatgtaggtgaattagaataatgaaagaggtgtatctcacgaaacacaagcataaggaggaagcccctgagtctcaggagctgactgaaactagagcctagaatgcccacagcacccctactttcctcttgtatctactctgcttttggagtcagttttgttctctctcttttaaaaattattatttttttaaattttaagttctgaggtacatgtgcaggatgtgaaggcttgttacataggtagacatgtgccacagtgatttgctgcacctatcaactcatcacctaggtattaagcccagcatgcattacctacttttcctgatgctctccctctccctgctccacccccaacaggcctcagtgtgtgttgttcccctccctgtgtcaaaactggctttctctgcctctcagtccatgtgagaaaaaatggctacagcctgcaactcctaagtggaaaagatctagccaccaggaaagagcccacatgtctttcccagtctcaattccaagttcctagaaggggattttagcttaggaaggatcagcttttcacctgcggtccatcgcttgtgtgtgtgtataggaacatgccctttgggagccccatgcacataatggtgtggatggtgtatgggtagagttttctgaaaataggggaggactggaaagttaacctgatagacagacagcttggatcttggataagaaagtaattagaaagagttctattgaatggtggaggggatgtgaaaaagaggaggggggcagagggatgcaaaagaataaatttcccaggtggtaattctaagggtttaggcaagtcagtatttgtaataggttgagttgtgttcctcaaaaagatatgttgaagtccagccccaggtacctcagaatgtgaccttatctgagaatagggttattgcagatgtaatgagttaagataaggtcattctagaatagggtgggccctaaatccaatacgattatggccttataagaagagggaaatttggacacagatgcggagacacagagggaagacaattatgggaagttgaaggtagagcttggagtgatgctgccacaagctaagtagtctggggctgccagaagcttgaagaggcaaggagggatcctcccttagagacttcagagggagcatgacccaccagcacctcgatttcagatttccagcctccagaagtgtgagacaataaatgcctgccatcccaagccaccagttcatgggacttcattatggcagcaaacacagtattctttagccctttcatgcatgttgaactgctacctgtcccatgcttcaagcaccacaaaagcctaaactcctgcagtcccacttttcctagcttggttcacgacaaccattcacctttggcttaaaaatcttccttcctcattttctgatttctactttgcttctggcttattgacttattacctcttctggcctcatcattctttggattttgatatcctttactatttgatatagccagtttcaaattattcccattgcaagggatagaaacttaaatatggaggatttattagcttagaagtataaaatgcagagatagtctcacttcaagaagagttggtgataaaaactcagacattgtcgctaagacaatgtttcctttatcccatgggtttgccttccttatcactgtcccaaacccccatcaggctctcctgtctggtacaaggtggctacctgaagtgccaggctgaggtctgaccagcagattgactagtaggacgtctttctcttgatagtcccaataggagttgggagaccacagtctgcctatttaccagtaatgaaaactgagggaacatactattttaattgattccaactgggtcatgtgtcctgccctggagatttggaaggaagtcagctaaatctgaatcaaatgtgcccacaaaacacttgctgaatgggagattgatattgggaaggcaaaaataaaaagtgtctagtgcatcttcaacctcaacttagattctttattcttctgtgttgcaataggctagcaaatacctattgtggtataacatgacccaaccttgtaggttcacttagtttttttcccaccctgaaggagaagtaggagaatgagtgccttatgagttcaaccaacatgtttactcataaaaattcaatcaaatgacataattaatattttccaattcataaaaaatgacataacctagtggatagaatttgataaactacatgcttttagcccaaaaaagttttctaaaatctttgacaactgatactacttgtgtacactgtaaactaaaaaagagtggtttagtccaccattatgtctttaattattttttcattgaatataccaagtgccccaaagacaaggttgagtcagtggacttttgtctgcctgtgaggtgaagggtcttctctatccttgccttatctatctctttgaagcactttccttcaatggccacctaacgcatattctttgcagaactgggagacttcctgggttatcttcagcaaaacagactgctactcttcacagaaacagcattcttctccttaaagttcttcccgggcctagggctaaactatcaagtatgtttttgaatatatgttagcttcaactccatacctttgtcctgccattgtttcttcctggaacacattgaagacaaagttatagctttattgtcttctgccatgaaattttccttggtcacctccatgctaagactacatcaataagaaataaatacatagaccttgttctagtaagagtgactaataataagccaaaattatacaaataattctatatttcctgttgtgataggcagtgaaaaggagagtgctgggggaatgtacatcaaggggatctaacctagtcgatggtggagcagggaatagagaaggtgtccctgagactgtagtgtttaaatagaatcttggaggagtagcaggactagtctggtgatgtgaaggttgtatggtggtatggtggagtttgatcatagatatggtagttacaggaagcagtttggcatatctgagaaatgaaaggatgacaacatggaggcagcaatgagtagaaggaaagtgagatgagctcactcaaggatggaggtgcagccaatgatgagggagagtcttgtgagccgcatgaagaactttagacataatgctgcaagcagtgggtggtaataacaagatttcagacaatggcaacctaaatgggtttgcattggtaaaggccattctagcttccatgtgcataatggattggggagagacaagaacgtgtgcactagactcttagattgtattcgtacggtgttgaatcatcactgggaaacttcctttcttgggtacctataatggtacttgcctttgataaatgtgcctcttagacgatttggatgcccttaaaactcgacatgtctaaaacctatctcatcatctttttcaatgccctttcgccccataaaactcccaacctgggtcacatgtcttggcaaatagtgccaattttcattaggtttcgtaatccagaatcctcatatgtcttcctttctctttgtctccctcaccagctctcactccaaatcctttgccaaaattgtctatttaatcccccttacatcctcaaatccatcatatctctccatgtctgtaaccatcttctgacagagccaccatcatctctcttgcccaggggtcgacttcttcctcattcacttcattgtcctcactctgccgactccctgccagtctgatctttgcaccagagtgttcttttcaaaatgcaagctgagtgctgtggctcacacctttaatcccagcacttcaggaggccatagctgggagaatcgcttgaggccaggagtttgagaccagcctgggaaatatagaaagacctaatctctacaaaaataaaaaaataaaaaatagcagggcatgatagtgtgcacctttagtcccagctacttggaggctgagacaggagaatctcttgagcccaggagattgaggctgcagtgagctatgattgcaccattgcactccagattgggtgacagaacaagaccctgtctcaaacaaaagagaacaaaaaaatgcaaacttaatcatatttcaatcctgtttaacatcttgtaacaactttctttgctcgtaagcttcagacagaattccttaatacagcctgcaagccctattcagtgcctggtcaataaccactctcagccgcattcatctctgctccagccacagtgaaatctgcaatagaggttgtccctactgtcccctctgccctattgtcatgattttgttagcatatattcctacatctcatctcagttaaaggttcacttcctcaggaagcctcttctaacttccctgaccaggtcaaattctcctactataacatctcttagctccatgttcgtgcttgttgcagttgcaattttgcatttgtctcagttaatttctcttccctcactagattgtaagctctgtgagggaaaacttagcactggtttttgctcatcattatagcccagaatctcaaagaccttccatgatatttattgaatgaagagtgacggaataaacacatatcaaatgatgctttttattgaatatctaatgtgaaccaagcaatttatgtgcattatcccagacctcaccacaatctggaagacaactcggatttattttttaattttaaagataaagaaaactggagctcaaagaagtgtacttatcggagattacagagctcataaatgagctatttaacctatccagtattaaaaagctagtctatctgtttctatgggctgtgcagtttcaaccatagcatacagaatgctaaggctcgggggaaactggaaggcatttgatctaattctgtcatcttgctagaaggaagctgaggctcatggttaacaaaaccaaaccaaaccaaacaaaaaccaaacaaaacaaaacatacacattcacatagaacatccataggagagcgcagatagaatctgtatctctcttgactttgttttttctattatcatatgtcattttaatcctctagtaaagagtagcagcagtgacttaacagattttttttcattgctgctgcttcttaatcccttttgagcctcaatttctttttgtataaaaggggaacaataacgattttgtagagatgaggtatgcaaagtctctggctgcagtgagcactcagtaataagagctatttattgggccaggattccaactactttcataaaaatagcaggaaagtcaaatggaaagctgacttgatggtaggggaggcttctgcccaccaactagttccacgtttctcaaccctgcactgaatgttaaaatcacctggggaacttctgaaaaattatgatgtctggtcccaaccccatggagcctggtttatacagggacaagatatctataggtttttaaagtttctccaggggattctaatgaccacccagggtggaaaagcatggagctaactggggtgcaggacgagtgtcctcataagaagtcaaaggtttggtgataaacaacaactggccgggcgcggtggctcacgcctgtaatcccagcactttgggaggccgaggcgggcggatcacgaggtcaggagatcgagaccatcccggctaaaacggtgaaaccccgtctctactaaaaatacaaaaaattagccgggcgtagtggcgggcgcctgtagtcccagctacttgggaggctgaggcaggagaatggcgtgaacccgggaggcggagcttgcagtgagccgagatcccgccactgcactccagcctgggcgacagagcgagactcagtctcaaaaaaaaaaaaaaaaaaaaaaaaaaaacaactgaagcacgttttcaaggtgagatccattggaatgtatattcctgtccttaatttagtttaaagtgatggatgtctttttattttttcaaagaaacaacaacaacagattttttaaaattttgcaccagtcaccgttgcccaaagtggtcatccagtggtcatatctgaattgctcttgtagcaaggaattctggaaaacttcagggcatagagtctgctgggacagggtgggggtggaaatacatgactgaatggtaaataaaaccaattttcttgttgctggctttctggctacttaatgtaaagccataattatttccatagcaacacactcatcacatacaacatgaatatgtagattccccagagggaagatggaataaactgtatctttgtacactttacttgaaaaagaaaaataaagcttgtataattccaatccacagttgcataaacagtattttacatccatgtagataattaatccaaattcatctataaccaccagaaatgaatgatgtgctcactgaggccatagaaaaataccctatacagtagtgcacatccgtgattttgttttccatggttttggttgcccatggacaactacaatccaaaaatattaagatatttagagagacagcgcaagagtgagagtgcaagcacatattcacattacctttattatggcatattgttataattgttctattttatcattagttattaatgttgacttcttactgtgcctaatttataaattaaaccttatcataggtacataggtatagaaaaagaaacaagagtacaaggttcagaattccaaatctgaaaatccaaaatctgaaatgctctaaaatttgaaactgtttgagtgtcaacatgatatacattggagcattttagattctggatttttggatttgggatgctcaagcagtgcaaatattccaaaatccaaaaaagtctgaaatcctaaacacttctggtcccaagagtttcggataagggatactcaacctgtatgtatagggtttaacgctatctgcagtttcaggcatttactgggggtccgtgaaacatatcttccacgaacaaggtggggactactgtaattgatacgtatgtgtatgtgtgtttgcaagagacagagacagaaacagaaaaagataaagagacacagaaagacttgaaatcatagtacatggagatttttagagggaaatccacgtcattagtagcctcctttcagaattaaagctctcaaagtactctgattattgaagcacttgaggcattggtactagacgggttcacagcttggagattgcactataggctgcagatcatgcagggaaagaagacaagtagtactgtggttgtggaacttccacagaggagaggttgtgggtcgccatctggtgagaagggcgcagtagagttgggtgagcatggaggtgtctcagaatatttgaattgaagtcttactatggcttttatgcagattatatttttactgactttgacttggaaatggagatgtgataaaacattcttgagtcactactttggtattgccactgagaagagctctccagttttctcctttacctctttaatgccacggtctgtggttttgaagcttctctaggatctataattctggatctcgggtgaatattccaagtgaggagggggcggtcataccttgggtgagatcaaaataatgagcacagagactatcctgcatttcctggaagaatctcaattccaatcagtcctctgtgattccacaaggaatttttagattgggtatgcaaattactcatacagaaatcattgtttctagagatatgacatggtgattctcattctggctgactgttttaatgttctctctccttataccttttcctatactcccatataaacacaaaaccatctctgtctacctacctccctccctctgaacctctatttacctatctagctaattctctttattgagatatagattgagtatgtgtgtatatagaaaaaatatataagtacacctcccatattcagaaaacatttactgaatatatattatgcacaaggtactctcatatactcttaaaatacttcaatgaataaaaaaagaaaaagtctttgtccttgtgaactttacatttttggggttgaggggagcaacaggcaataaacaataactataataaacaagttacaataagagatacacaaaaattagtgtggggcaaatggaatggggcatgggggcaggttgcaattttaaataagagggtcaggaaagtctacagtgaaggtacacttgaataagtagaggcgtatattatccagaactggctcttgaacttcagagcaaatgggaactgtttggtttaagttacgtgttttttccattgccttattttcactgagatgttggaagtcccaggaaattgtgtattgttatatcagttcttgaatgggcagaaatttgactgagaaaagccagatcctaagttaatcagaaagagactgcaaagagccaggctttagtttaaaaagtgaagaaccagactggagagatcaagaccagatcttgatgacaggttggcatcagcttggaggcgtgaagaaattggacaatttatggtcagccagtcaggttgcatcataattcctagtctgcacaagaactcaagggaaagaacaaataagttttccggttctattttcagtttatttgctctctgttttatggatttcagactcttcaaaatactcttcagtggctttgtttccaaatgaaaaccagaaaaatgatgctggaatttcatagaggcagcggcggatggaagagggctcctcctgtctataaccatgggaatattgtttttgattgtagaccaactaactgcaaagagagaagacacataaataagacaagccctggaaagcacatgtggtgtgacggtgtcctgccaaagctgagaagacacaaataaaaagtaattatttactctttgtaagagagtgttctaaacccaagacactgattcatagatgctatcatggccctgtaaacacattaaaaatcaaatacaggttatattacatgtacccagttcatcttacaatggtaaagtccagaaattgtcaacagtctaaaaaaattctaactacttgtcatattaatgatgtgtaataaggtataatattgataatattttatattataataatgttatattatcttatttcttctagtcttgatcttgtttgttttcaggtcttagccatgagggcatttaaaatgttttctgattatgtttaaggatgattgcactgcatgaaatccttcagaggcctcacacttcttttaggataagattcaaatggcttatgaagcactaggaagtctttttgatctgcccccctccccatctacctctccagactcatcctgtgccactgtcccacaggcatccttcctgctgccagaacaactttatgcagttccacgaataaaccgtggtgtttcatgcggcagtgtctttgctcgtgatagttcctttgtctagaacattcttcctgccctcactcaccggactggatttatctcttcctccgcatagttcttctaacctttctttctcagtcagactgaatagggatctgagtcccataagaccccaggcaaacctctcgcatgactcttaccagcttgaaatgttaacagttgctctttttgtttcttatgccaaagactaagaatttcttgagagtaaaattgaaatgatctcttaccccagcttccagaatagagtaatagttcttagtatatatagtggctcaatgtatatgtgtgtatatgaaattaaattgaagcactgaaggtctcaaatattgcaatatccacaaggtaatgaatctgggaactttctggcaatcattacactaatgtcagtgacagagatggagctcagaaagttataactattattttaagaagcaattttccaaggtcagcagtttaccatgagagcctactgactttctccctaacccacaggagacagatttgagagaggaagcgataaatggcttttcaattccatttacttccacagtttttaaacgctacatccccactgtcttcatataaactccaaccagcatagacatcgtattataaatggaattatcaccttgtaacatggcagaatagtttgtctttgatctaagatggaccagctaacaactctatctgtgcaaggccattttgtgtgcaaattagaaagcaggtggaatctgtgtaattataggacacacatctggacctggctcctttctttatgcatccattccatttgcccaggctctgggtccccagcactgtgtcctgtgcaaagctgacctccattgctacactactgcttgtccaaactttcccatcttgaggctcttttcagtgcttctgattcgccaatctattgaactaattcctgttaagctgccagtgccatagattcatagaagcttagagttttaacccttgaggtcaaatgcaggaccttcattttacagaggagaaatagaagatctggagaaggggaggtagccagcccaaattcataccgcggacaggcagaattatcatttaggttctccctgacattccagtatagactcaccgacatagaatctaatccctgctcagccatttactgatataattatggaaaacttgctgaaactctcaaagtctctgtccttgtcctctgtaaaatccagaaaatggtaacttccacctcacagggttgttataaaggttaaataacaatatatagaccaggcgcggtggctcacgcctaaaatcccagcactttgggagcccgaggcgggtgatcacctcaggtcaggattggagaccagcctgaccaacatggtgaaaccctgtctctactagatacaaaaaattagccgggcttggtggcacatacctgtaatcccagctactcgggaggctgaggcaggagaatcccttgaacccgggaggcggaggttgcagtgaaccaagaatgcgccattgcactccagcctgggcaacaaggccaaaactccatcaaaaaaaaaaaaaaaaaaaaaaaaaaaagacatctaacacggttttagcacagcttctgacgtgcactaaacatttaataaatgctgaacaacttggagcaggatcttagaggagatgctttagagcagggttcccttttagccttcagctcagccaataggtgtttattttgaccacttccagtaatgcactttgctcataggtctttcaagataaacggaacgtccctaataattaatgttttggttatgtgcccacttgagaagagataccacttcagcctcttccgtctccgtggtgcagccaggccctagcgtctctccatccccgttccccgcgggctcccaggacggcgtccgcgggcctcagcgactctgcggagggtttccgcgggatgctcaagggggcagtgtggtcctgccgaagagggccgcctcgcctcgaggaacgccttggccattttcacaggaaaatgtttaccctggaaattaaattatatttgggattttgggtttcccctcccccaccccgccgtgggaggtttcggaaagttactgtggtgcccagcgcagtcagaggcctgtcagcatttcagctccgcgcggcgggccctgcggcctccttcagcacctgggacccccgggaccccgggcgtgtgagggccgagcccccccgtgaggcccctggctccgcaccagcccagcaacaccccctccccccattctcccatctttagccacttttggatcaacagcttaggatgaatttcaaacttaagttggatggtttgagagggttggggtgtgtgtgtgtgtgtgtgtgtgtgtgtgtgtgtgtgtgtatgtgtgtgtgttcccaaatattactgagaaagtgctcttgaaatgcgccctgtgtatccatggattcatgcatattcatagcctgttcctctctgtaggttcaggtttttcttttctgtcaaacgaggcattaagtaaattctaaggtctcctgcatctctgacattccagagttctagatatataagaatagagaggaatctgtgaaaaagtccaaccctggggaactccttcctttctctgtggctttacacagtgaaaccatcacccaatgctcttgataacttaaagatgaaaatttcctgttctccagatatcctgctcaattcacccatcatgtaccaccaaatatagattcactgcactttgtcctgtgtcagggacaggggtggcttctgcacataaagtggtgaagaaaacaggtacactccctgctctaatgggccttgaggattcgtggggatatcgctgctacatcaataatcacacataaagggggtgaaattacaagtagaggtgagcgctttgcaggaaaagtaaagggtaagataaagtgtaaagaggatctaatttagcattaggggtcagggaaaggggaaatgatcttctagctaagatatgaaggacaggtggaaggtggccaagcagtgtctgtgtggtacatcatgtgtaagaaccaaattactgccatagaatggctgtttgagagtgataaaccccctcttttggcatccaaggaagaaattaagtcactctaattctcagagaacacttatagcaaagtccatgatagttcttataggtagttatattgtcaaagattcagagcctctcacagtgagaagaaacctcagaggtcacctgactcaaatctgttctgatttaaaaatctccttcaaaatatgctatacaattatcaagattctgccaggagtctcagctactcaagagtcatttttcccactcttgacaagtcattttcctgccattgagttcttagattcccattacttagattttccttgctagactgtaaattccatagggcaggaattttgtcttctttgttcaatggtgttatctcaagtgtcatgaacagtgattgccatgtagtagcctttcaaagcacatttattgaatgaattcactgagactaaaataggcctccctagatttttgctcactggccttagttctgccctctagaacaacaaagaacaaacctaacatcttatgtaaggacagtcttatggtcatttaaaaatagccatcattttctggttattctcttctctctgttaaatacttccaagtatgtagttttgaaactctcaacattttgatcactatttgggattcaatctgacatgaccagtcacctgatgtgttttggctccatggccctacccaaatttcatcttgcttgtaatccccaggtattgagggagggacttggtgagaagtgattggatcaggggggcgtttcccctatatgttgttctggtgatagtgagtgagttctcaggagaggtgacggttttaagtgtggcatttcctcactctttctctctctgtctcctgctgccatgtaagacatgctttgcttcctctttgccttccaccatgattgtaagtttcctgaggcctcctcagccatgtggaactgtgagtcagttaaacctcctttctttataaattacctagtctctggtagtgtaagttccagtctgaaagctggcagtctaaagactcaagaagaggtgatgtttcagtttgagtccaaagactaatgtctctgttcaaagcagtcagacaggaagagttcccccttgttcaagggggggtcagcctttttgttctgttcaggtcttcacctattggatgatgtctatccatattaaaacagagggcaatctactgttcagtctaccaattcaaatgttaatctcatctccaaatagccatatccagaataatgttttttgtttttgtttttgtttttgtttttttttgagacagagcctcactctgtctcccaggctggagttcagtggtgagatttcagcttactgcaacctccacctcccaggttcaagcaattctcatgcttcagcctcctgagttgctgggactacaggtgcatgccaccacacccggctaatttttgcattttcttagtagagacagggtttcgccatgttggccaggctgctcctgaactcttgacctcctcagcctccccagttgctgagattacaggcgtgagccaccgtgccaggcccagaataatgtttgatcaactatctgagcaacctgcagcctagtcaagttgacacataaaattaaccatcatattacctatcagactatcaaagaaaagtgtgtgtaaggaagctttgaagaattaacttacagtgagagatagtacctcataggtgagaagtagctagtggcatcttctgggaggagggtaattggttgggtttgtatacaggcagagggagaagaaagttttacccttactaggtccagaggaacctgtggaactaatggcaatcatgagagcagatgggacagattacattcagaaaaactcctcatgcactaataatttgcttgaataattattctttctaatacttaccccctccacaattttgctgtgaactggcagtgaaggcaggaccaaaacccagaaagaacttattcactctcaatcattctttaggcttggaaactggccttaacccattcaatccaaaggtgataactgtggcccaaccccttaccagcttcaggataaaacactgataatgaaaggcaaacccagaatcatcagggcctacagcaacagagctggaagttgggaattgtgctaaccagaaatgtatttgactttctaatgctggggtccaatcccaaattaacttatctcataataaaatgtaaatgatcactctctcaatttagctatcacacatagaaaacagttcatgcttactggaataaataaaaaaaaatagtggtataactcagtctccattgtaattctatgcacaatttaatacaataaaatattatgagatgtgaagaagctagaaaataatatctatcatcaaaaaataattcaacagaaacacagatgaactagatattgcaacaagcagacaaggagttacatattattataataacgttttaggatgcataggaaaagatgaaaaagtaaatgaataggcaaagatctcaagagaggtttggaaagtattaaaaaaaagagccaaaatagaaattctgcagctaaaaaatacagtagctaaaataaatacatattagatggctgaaaaggaaatgtctagctccagatggttttactgacaaattctaccaaacatttaaaaaatagcactacagtcaggtgcggtggctcatgcctgtaattccagcactttgggaggctgaagtgggtagatcacctgaggtcaggagttcgaaacaagtctggccaacatggtgaaaccccatctttactaaaaatacaataaatggctgggggtggtggcgggcacctgtaatcccagctactcaggaggctgaggcaggagaatcgcttgaacccaggaggtggaggttgcagtgagctcagattgtgccattgcactccagcctgggcaacaagagcgaaactctgtctcaaaattaaataaataaatagaaataaaaaatagcactaattctacacaatatcttccaaataataaaaggaaaggaaagattcaattcattttataagacgaacactaccctaagaccaaacatagacatagatcaatgccaaaaaaacaaaactatagaccaatatttctcattatcctagattcaaaaattcaaaaaattttagcaaattgaattcatccatataaaagtataccacaaccaagaagagtttattccaggaatacaaagactggttttgtattcaaaaaaattatcaatgtaatttgacatattacagtggattttggtttatattaactaaagtttatatttattagtttatatataaacagtttaaataagaaagacttcatgatcatgtcaaatcatgcagaaaagccattcaaaattgaatataatgtggcctaaattatactcatttttataccaatttggtcataaaatgtaacctttagtatcttttattgagaaagggacccacaaaagcaaatgtacctaggtcctatgaaagtcataaagcaatcctactctggaattatatagataataattagttggtaatcttaagttgtatcactgtaatatatcagtttgtttcctcatctatacaataggagataatgaatagtttttatttcataggagtgtcgattttcaaaagattatacaaatacctaaaagcttattaaactgctttttgtataaggaataacaataaatggtagctgctcttaaaatgcatatatatgatatgatatgtactttgcttaaactttctgtatttttagtttatcagttaaattgggttaggacatttgtattacaagacattatacatttttggagattcttttccagtttcacaaagtttgcataaggcttaaaaactgcagttatactttgcaggctaattcccgtcctagcatttatgcaaagatctacgaagatccaaccaactcctgtgggctttttatgggatgatgattctgtcatatactttctatggcacgtaggtttcagttatcttctcagtagcagaaaaatgacttatattcacccacttttactttatacttagtcctctgtttatttttctcctctataaaaaaatcacttaatggtagaaaagcttttaaagatataatttgttatcattggtcagagatttttctccgtatgaaattcattgatcctattggatcaaactggtctgattggcatcatgttctaatttagtgattctaaaacccacctacagaagcagagggttgttgctttttaatacgaaccactgtctctcactctgctgattcaggttttttagataaattattttaaaagctctcaggtgattctaatgattgaccagatatggaaaccaatatcttctcaactatccaaactatcactcatgtgaaaaagcattgttattttatgaaaatggactagggcaaggggaaggagctctggccattgatgccaaaaaagctcttagatcctattttttcttaaaagtatgattatgtgtagagtgatgaaagtttgtttgacatagtcatcttagtcattactgaggcataaatgactttgagaatcttatcagtgctatcgatagaccctttctccaggaaattcagaacatttcacagacagtttcagagagttaaagattttttagaatatttctaaaacagagctttcagatgagctgaaatggactatggaggttgtctgtaaggtgacccactcaagctctcagctagcacgttgaattggatgatattgggtagtactggaggccaaccacactgcagagtttattctactacattcagctttcttttcttttcgttttaaaggagggtaatctaacatattatgtctaaactttaattacttggctcacaaataataatggaaaccttccttctcaaagagtgacagaaaataaaatacaggctgtggggaaactctatacatccttgggtctcagttttcttcataagatgaagggacttattgggtcagagcaatggatttattttttttctgactatgtttttaatttcaaaatattttaaccacactaaatgaaatgatataacaaacccacatatatttaccatctgaatcaaaaaaccttaatattctgccatattggcttccagttttttaaaagaggtaaaatggaacaaccacaattgaaaatcactgtatgtactatcttgatctcatctccctgccttccagaggaggctacaatcctgaagctgctgtgtgtcattattgtttttgacttttattacgtatatatcaaaaaatacaatataattctacaagttttggaatttgagttaaatcaaatttgatcagactctacatattgttttgcaatttatttttttactcaactttatatttttgagatatttccattttgacatttgtagctccagttcatacattttaagtgttatatactattctgttgaagtaatatatactagaatctcagaataagtgtgaaattcaagtgcaatggaatttatctttgaagaataagacaagagtatgtcttcttatctccagtatcctttcagcataatttcattgaatataaccctcaaacaaaaggaggtgacaatgaactggaaaagtcgtggtactgtaaccactctcctggaattttattccaaatataaggccaagaaacactcccattgatatttaagctgagtcatacaacttcaccaggtactgccaaaccatagagagtgagacccaagaactgcaagatctcataactaaaatccttattttacctggctgaatgtttgaacctcatttattgtattttagagagattttactgtacaatagttaatttatatgttctcctattgatgaatattttggtcatttctaatcactcattcctagtgtttttaatatcattttatgttttcttctacccaggtttgagtatttctctagagaattcatctaggagtgaaactgttgaataaacagctctgcagatctcctccaagtgattgtactaatttattctctaaccagccattatgggctgattatctgtgccctcctcaaactcatatgttgaagcctcaatccctagtatgatagtatctggagatgggaccattgggaggtaattaggtttagactagatcacaagggtggagcctttatgatgggattagtgtccttataagaagaggaagtgaaatgagagctctctctgtcagcatgcacacaaagaggtcatgtgagcacacagagtgatggcagctgtctgcaagccagcaagagggcccttaccaagaacagaatctgttggcaccttcatcttggacttcccagcctccagaactgtgagaaataaatgtctgtggtttaagtcacctagtctaaggtattttgttatagcagcctgggctaagacactagaatttacaaaacttctcattgatccacgacttcattcagcatttactggcattgtcagattgatgcaaatctgataaacataaaaaggtatcccattttggtattaatttacatttccctgataactggggaggtgtaatacgttttaatgattttggtcccttcaattaccacctgcgaattaactgtttacatatttatcacatttttaaaagaacagttgtctttttattattggttatgttaatatgtcatagatctgtttataatatattaacatatgaatttatattttaaataacatatatctatataaacttatgtatacaacacatatatgtttatgtaacatatgtcatttatttatataaaacatgttacttacataacatatttataacatgttataaatataacatatttatagttatatgttatatattacacatataatattaaaatatatttatattatatatagcatattttatatgttatgtgttatctgttacacatacattaacataagtaatatgttaatagtcaacataacatatttaaattataacaaatttataacatatacatattttaacatataaaacgtgtatatttatatgttacatattataacatatgttataaatataacaacattaacatatatgtattaatattatctttcagttcatgacttgtcttttaattttgcttatggtggttttctgtcctacacaagtatttacttaaaaaaacttgaaacataagctatacacaggaaattgcacacagcataggtgtacagcatgaagaacacacctatgtagccagcaccccagaggccccatcatgctccctctcaacaaaccttcccacaaaggtgaacaccatctatctacacttactacttagttgtgtctgttttctgaacttcatataaatagaatagtgcaaaatatattattttcctcaataaggtgctacttaaatgtttctgtgtttttttgtaaggcaatagtttgttccttctcctaattctttattttattattagaatataccatagattattttttctactattaatagactttttcttctcagttcttggctaatacaaatagttttcctatgaacattcctatacatgttggagaatatatgcaaacagaacattttggtttgacatatagctacaagtggaattgctggtcctagagtctgcacagtaccacacagtatttctagtactacacattatttcaaaattttacaccaatctctatttctaccagcaatgcctaaacagtcctattgctccacaacaatgctgtcttttggtattgacaataattttcattatagccattctttatgtgtagtataggctcttggtatttgtaatacatatttttctggtgactaatgaagctgaatatcttttaaaattatgttttttggaatttgaatttcctcatcttttgtaagggctgttcaagtctttggtttatttgaagtaatggttgtctgtatttaccttttctttgtatattctagacccaaatatttaacatatacatgttatgtatgtatatgtatattacatatggcatgttgtatatgtgtaaaacatgcataggtatgtatatattttatacatgtttgtgtatgtatgaatatgtatattcacccagaaatatatatacacatatgtaagtatacatacataatatatgatatatatttttatatgtgtgtgtgtgtgtgtgtgtgtataaagtatcttccctcattcaatgatctgtcattcaatccctaatggcatttttttcttcactgtatgacttttctatgctttctatattttatatttacatattctatattttctatatatcttgaatcataaaattaccttttaaaaattgaggcatagcatagtcacagaaaggcacacttcagtgcataactcaaaatttcacacattgaacatgtccacataaccaggccccagatgaaacaggatactgtaagtcccaagtcttccttgcatttctttccagtcacagttttccaggtgggggtggggagtcactaacctgacttctaaatgcatggagtgggttttcatatttttaaatttaatataaataatgtgatacttcttttggggggtgtctggtttagtttgtttaataatagattttgttgctgtcttagtccttttgggctactataacaaaataccataaactcaatggcttataagaaacagaaatttactgctcacaattctggaggctggggagtccaatatcagggcaccagcagattcagtggctggtgagggttcatttctggttcatagatgacacctagctacatccacataaggtggaagggagaaggcagatctctggggcttcttttataagggcactaatcccatttatgagggtagaagcctcctgtcctaatcacctttttaagtcctcacttcctaatattatcacctctgaggttaggtttacaacatatgacttttgcagagacacaaacatttagaccatagcagttgcttagagcaactattttattgttaaatagaattctcttctattaatatgccataatgtattaatcctactctagacggatattttgataatttttatgttgtagctgttacaaataacacagctatgaatgaacaatattgtagattttttgagagcatatatatgcatttcttaggtgtagaattgctagttcataggatatgcatgtgttcagcattagtggatacttccaaatagtttcttcagtcttttttttaagccaatctacactcccctcagctgtctttagatatttgaagaagccagccaagtccagagaactaaaaaacccacttacagacttgaagttgaaacaaatggttatgtctttgaacaactgagattaagggtagtttgtcacacaatattattgcctcaatagacacctgattgacttgcattcttggaataaactctcatttggttatattatccttttatataccactgaattctaattgttaatatttagactaatgatttaacaatttttacatctatgttcattagcctgttgacatttaaattgccttttttgtaatgcccttgtcatattttaatatcaagctatgctgacctaataatttgagatgagaatattcccctccccaactctaaacatttcctcccctaatctcttccagagtgtgtgagaaattggtggtgtttcatccttaaatgttaggaagaaatcactgtgaaagccttctagtccttgagattatttagcagaaagaatttaaattatagatcaatttaattaatatatatgaaattattaatatttatttcttctcatttcagttttggggatttctagaaaggtatcaatttgactaaaactctcaagtttacttatataaagttgttaatatccttttattttctagtaatatctgcaacatctatctgtggcgatgacctcattttaatgtctgatattaaggggttttccccttctctgtttttgatcagcttttttagctgagtccatgaattttattagcctgttttgttttaagaaccattttattgtttaatttttatattaataaatttgtcttctatcaatttgttcacatcaagatttctggattttttttcattttcttagggtaaggtttttttcaacttttttagattggatactttcatattttctaatatattcattttaagcctataaattttatccttaatagcttcagctttacttcacatcatctaatagcagtagtttcatcattatttagctcaaataccttatattattttttgttaattctattttgatgtggattatttggaagtatgctgactattttttaaagagtagaaattttctggtgatctgtttgttttcaatgtgttggttcattctcctgtggtcagaaaacaggctccgaatggtgtatctatccttgttctgtgtcccaagcagagaacaggttcagggtataaaattatcacgccatcttcaaattgagagttatagggtcttgtggttctttgagttacctaagagtcagaaagagaaaaatcaggctgaattctattctccccctgccctatttcattttatttacagcacacctaccttatctgttttactgactaggttttggtgtaagatttttttaaaaagaatttcgcatcctgacactactaaaaatacaaaaattagccaggcatggtggcgtgtgcctgtagtcccagctacttgggaggctaaggcaggagaatcactggaacccaggaggcagaggttgtggtgaggcgagatcacaccattgcactccagctgggagacagagcaagactccgtctcaaaaaaaaaaaaaaaaggatttcactgctgaaaatgtttataaaccactgtattattagaatatcctgcagtagtttagttataaaatttcattattctatatattttgctattcggaaaaatcatattacccttctgggttcagaatgatctaatcaggttgacatggtatgctgacctccatacagttgattcattaaacttatccagttacattattattatgttaatgtacatatatgatctgggtgtgaatgaccagatggacgtctgctaagttttataaaaaccaatatagctagttatcaagtaatctagtaaaaaatattcaacccatcctgaagatcaaagacatgcatgttaaagcagtagagtcatataattttctttatttatcagaatggcaaatattaagtatttttatacacttctagtgagaatctgtatttaaaattagatggcttttttttttttttttttttttttttgtctaaggaaagatctggaccagagtcaggtgtcacaaactcaaatgcctacaggagccagaaaagggaaaccagattgacatttctctttcccatggaagtgttcaattttgaaagctttctatgaagttctaggagtgtgtctaaaaataatgaatagagccagtatgtatttcaagtataagacaacaattagatatactcaaacatgaagcatttcagcaccaaatgacccttcttatcccaaatgcatacatgcacttgctgacaagttctgctttaaaagcataaagcaaaaaaaaaaaaattaaatgagaactgaaggagccatagtaaaaaaagtattagtggtgtgtgctgaatctttttaaatctaaaactaatataagccaattatgcaaataatatttatggaacagattagtcatgcgacaaaatataataaagataatgataaacataataaaattacttcaaaaatttaaaaatgcagttagaagaggtaggagaaggtgtgagatttttctttgttagagtaatagggtcaaaactgaaatttgctaaaaatatcaaacacatagatttcaactactacatagcctttcatcagtcttagagggatatttttggaaaataataaatgaggtcattatacttttcccccttctatgaaaatcaagttaaaataaatgcttttatgcaaaatcactgcatgatctttttaaaataagttttcgaatccattactgttctatgcatataaaaatggtatttgagatgatagtcccccaataataatggatatttcttggtggaagatttaaggtgacaaaggtgttttcttctttctactgttctccatgtctaaaattatttaaaaagatcaggcaataatgttacaagaactttaactcatcatttttcttcttcaaataaaaataaagcaaatatcaaacaaacacatgaaaaaaattgtgtgcttcattctatatactaattgtgacccaaatgatcactgagatttctgtaattctaaaccatatcagtctggttctaactaatgagcaataagaaaactcatgagacagctgtccttgcccctcagaggacatcccatctcctgtctactcttgccttggaactggatctatcctccctcccacctctacccagtagctgcctcttctgctgtctctgcgtaaaggttcttccatggtcttacgtaaattggaatttaaatcctgcaaactacattgtgagactaatggatcggaagagatctttcctctctgcctacttctcccttgaagggaaccgtatttattgctttaattagagcaccaagctgtaggagtaaatgcaagtcttcagcacttctcctgacagctttaaattggggaggcaacttggaaaacttctgttgcaaaaatgccagctggataattagtactatgtggctaacagtttaaaaaagctgggaggggagacaagaattagtgtaagcatctttaacacactttaacattctaaaatgggtttccaaaaatgttgctgctgaaatgtttgcaagatttttgttaaatgtggcttcatgtattaatgttctttttgtgtggagggaggaggaggtgttgacattcatccaacctgcagcaagtgtcactggattgctgagctggctttctctctgtgctgaaaggaaagaataattccctccaattattcctccagggagaattaaatttgccaactgattaaggcaagaaaatacaaagtttctcaaagaattttgggaatttagcatggtctgaataagtcataagtttttaagatagtaacctgtagtgtgtccagggtgatgtccaaaattgctaatgactactgaggtacggtccaggccaatcagaatagaagcttggcattatgctgtacaggtacacaatacttcaatattagctctggttgaatctccttttttgcatacaatgtacctctgcttgtttagaaagaagggtagaagcttttggtggtctctctagaagatgaaactgtttatagtcagatttaactactttttataaattttgaacacgatcatctttcattcacttattcattcaacaacccacaacattgaagccactatgtgctgaatagtaaagcttcaaagacaaacaacaaagaccacaatgtctgtctttataggtttgtgttttaaagcagggatcagcaaacattttttgaaaagacccagataacaaatattttcagctttgcagatacatggtacctgtcacaactattcaactcttctgctgtaacataaaagtagccatcggcaatacatgaacaaatgaatgttggagtgttccaataacactttctggatactagatattgaatttcatataatttttacatgtcatgaaataccattcctcttttgaatttttctgaccatttgaaaatgttaaaaaccatccttagctgataggcagtactaaaacttgtgggtgtctagatttgatccatggcctgtagggttcctgatctagagagttgacagtggagaggctcaagtcactagggtcaattggctgatgttgaaagtgaagagacagaacaccatctggcatagatgactgcacgcccattgctgtgtgaattgaagaacgttgttgctggaagaaacctcagagaggccttgaatgcctttaaagggtatttgcttcactttcaggtcattttcaaccaactgacccagtcaccttcaatggcaggacttggaaacttcccaaggcagcccactttattgttggatagagacattttcattaaatttgtacttttatttcctacaaatatatggataaaaaaggactctgaatcccagtaagacttaggatccttattttgcaatctttggcaggcctcagagaatgaatgtaaacaacttttccacaagacatatattacagacagttatcccatcacttgtaagtctttggctatattttttgccaatttttggtcacataatttgtttttccttattggaaggttgaaaaggcatggttctaggtttcctattctttctgattccttcaagtattcaatactagctcatttgtttacagaatggagaaaattaaaaagaagcttaaggaaaagaaaattaggttgtttccttttaaagtggtgattcaaaacatgtttgcataaaaataacaatatgagccaatgtgccctattaaaattaatctgcttatataataaggtttttggaccatgaggcacagcggttttgccttgagaaaaagtgctaatcccaaatgagccttgtcttctttgcaaagtgaatattaccaaagctagcaagtctcctaacctttcctctaatttctaatctttattaaaatataaggcaatttgttaaagtcattttagtaacagaggttgtatttaaatgggccaaagtactggggcaaaaatgcatgctgaattgtgtgtgtagggggggtggtgtatgcatgtctgtctgtgtgtaactgcatttataacactatattttaattgctggacattgtgttgtataataaatattacagacttcgaagttaaactgattatatcaaatagctccatcacataacatttggataactttgggcaagctacttctcaacttatctttaagtcttagtttcttcatttgtaaaatgagagtaataatatacattttatagcatcaaatgaaaaatgttagcaagctgtttaagagaaagttctggtatttgaatatcattatcttcttcttcctttcagcctctaccaaattgcttgtaaggctaataattgacaaagtgggagtaagagagaaaagaaaatgagattctggaaacccagtaggaaaaaatttcaagctagagctacaaatacattatccaagagattcactctctggtttctttatcctttccctagagtaattaaaatatgactgtaatatgattaaatgtttagtttaaaaagaaaatctctttctcatctgaaagttattataaggaagcagactggtgtggttctcatttaaaaatgtaaatgttggtttaagtgtgtgagattgtctcaaagtctaataagaaatactttggctcttctaattggaaggttgaaaagacgtggttgtaggtttcctatctttctgattcctattgcattcctggaggttggattaactttgggcacaaagatatttggatgctagctaacaattttctagcagtttgctctgtactttttgattacgcactttatgagaatcaatttcgttagtcctcacaacaaagtgacagacactattatactcccacgttacagatgaagaaactgagtcagtttggactcacattaaggtagcgacagagccagaatcgcactccaggctggctggctatggtttgcattgcccttcctgagttccccagggcatttctcccctctccactttccctcatcctttcttcccacttcagtgggagaaaaaggtactataaacctgatgaacaggggtcctaaatctatacacctataaggctcatgacatgaatgagtgtaggccttataaggagatatagaccgaatgccatgtaaagggaacagtcaccactcagctgtaattaatttttgagtaaagggaattcaatttgttcaacatttagcaaacacttaacccatgccagacagtctccttggcattcacacggctgtggttaaggaaataaaacccctgtgttacaggtttttatagtgtctttcccaataaaaaccaaaaaacatgtccactcagaacttcagaatgtgacgctatctggaaataggatgtttacagatgcaattaaagcaagattgtggatgagattaaactagatcaaggtgggccctaaatccaatgaaagtgcctgtaagaaacagagaagaacacacagacactcgggaagaagagcaccttgtgaagatggaagaagacatcggagtgatgtctctgcaggccaaggaacgtgaagcattgccggttaccactagaaactaggagagaggtatggagcagattctccgatttcaccaatttttcagccaaaacactggaaaataactaagcgaccagaagttcaggaattgttaagctagaatttgatatattcatatgattgaccatttcgtggctatttaaaaataatgttaaaatattaatttgaatgcaaagatacagtgccatataaagttaaaaagcagaagaaaagatatctggtcttaactgtaaaaatatatgcatagaaaaaattcaggaagaaactgcaataaaatgcagtaattgtttctctttgtgttggggttatcttgatatttttctgtaagctttatttattttgcatttttttcttatgaatatgtgttgattttagtatcagaaaataacatttgttttaaaaagcaggaaaagcactgagcgatggatgttttctagatgtgtattctattcaatattatcagtagcctctcaacaagatggtaaaaattggcctttaaacctaaaacaactcatagatctgggagaatctgaagggcagacctttaactgttgattttattctagcccagggaggatgagtgcagtaaaaaatgttagggctagaaggataactggagcctggaggtctgcactgtgctacttcgtaagaaaaatttgtgataatgatattttttgagacagtaaaacacagacctctaggtgtgaataaaacacctaagagaaatctatgttaagaggccaaatgatgaagaaatagcctacaattcaataaaggtaagcataagggttttgtttatgtttgttcattttcacccgattaaaagagaattttacaagatgactacagaaggggataatgacttacttttcaaaaagagatgattttagagttaacagcaagctttcttgatacataaaaatgtccaatttttaatcattgaaacagtcaataagaaagcaatggaaaaagaaacaattagggtgtgaacaaatcattgccaaattgcagatcctcagaaatgaaggcaaatgatactagaagtcaacaggattagagtataaacacttggtttacagccatgtctttgggaattcagctttagggactctccaaattagatttattctgagttgctagccaaacaagactagtgagttgaagctacaaaaagtcagcatttcatttcaatgtaaagattttttttctattcattaagaatattttcaatggatttggactatcttctgtgctaatgactcaagtcactatggggccccatcagaggtcatgccattgcaattgggttgatgaagctcccataccatgtagtatctggtcatcccaccccctcatgtgctcttctttccttatttccaatttagttaatgatatcaccgtattccacccagttgcctcagttggtaatctcaaggtcattttagccttattccacctcctcatactgctatagttcaaacctttgtgtcaccccaaaattcataggttggaatctcttccaaggtgatggtattagaaagtggtccctttagggggtgattaggttatgagggtggaactctcataaatggggctaccatccttagaaaagagactacagagagctagctagcaccttccactgtgtgagaaagcagcaggaagactccctcttgaaccagaaagtgggccttagacagacaccaaaccagccagtgccttgatcttgaacttcccagcctccagaggttttagaaaaaaaggtctgtggtttataaggtacctagttcaggatattttgttactgcatcctgaatggactaagacacataccaaattgggtagaaatgaaagccttagagaagtgcatgtaatgtaccaagtgtctactaatcttttcactcctccagtgccatattgttcaagcttttgtcatcacccatgtgaacttttacaataaacctgtaattggcctcctattctttcattcttgctcaatccatccaaccaattttactgatagattaagagctcagtttattagctcaaagactcacaacatataggcactcaataaatatttggtgagtcagtgaatagatgaatatgtataataagtaatagaataccaatccaaatatgccttccctgcttaaaagctcctccaaccttattacatacaggttatagctcaaatcttttaatttgatctgactcctgcaaaacttcctaagctcatttcttgacacatattttgatgcacagtgggtctctagtattgaactagaatagtgattctcaaaccttatcatacatcagaataagctggcaggcttgcaaaaacacagattgatagattctacttccagtatttatgactcattaggtctagggttgggccagagaatttgcattcctattcatttcccacatgttgatgatgctgctggtctagggaccatactttgagaatctctaggctagattatctaaaaaattctttcagctatgatagtcaatgatatttggtattaaaaagacctcaaagacttatatttgtaactcagactaattttatccaatatgatactatttgaagtgataattttgtttttaagccagatcagaaaagctagagaaatgttatagaagggaatatggtgtcttttccttttttttttttttttttttttaactttctgagctctaaggtataaagacacattatgccctggagctcagaaagtaaagaaaaggaaacctatcactggccctgtagagttactaggttctagtggttaagaatgtaagtttcatcattgtaaagacttatgctgagttccagccctgccctcactacctgtgaaatcttaggcagcttatttaacctcattaagccacaatctctccatccttcaaatgcagatggcaccaggatctatgtcacagggttgctaaggggattaacgtatataatgtgcttagctggatgcctggaacatagttgtgtgcatgaagtaatgccattgtatgtttaacaggtaagaatcttggtccacagagtcagttgataagaattgtaatttatctatttttatgtgactccatttaatttctcttaatagtacatattctaccatttgacaaaagataaattcaagtcaattcagtccccacccaacttcctttccttcaagttgcatctgctttctagggacttgtgtggtgcattggaatggtgtttggggatacttcattagttctatgtcattaacaggtctacactggtatccactgagaaagacataattgtgactatcctttggtcatgggtcaagcaggtcactgttatattattctaaaccataagatcactttaagttagactttgtctcatctgcttctttaccacccgtgaggacacaggggaaattctgctgctgtcctagacttctctaaatcaagggaatgcattgggtttgtttaagagccttcctctgtggtttcctggaaacagaggaaattgttccactgcctccagcttctcactggtatatgtggggactctggggatctgcctcaatccattgtgcacataggtagcatgcctgatatggcttgactgtgtccctacccaaatctcatcttgaattgtagctcccataatccccttgtgttggggattatgagggactggtgggaggtaattgaatcaagggggcaggtttttttccatgctgttctttcatgatggtgaataaatttcacgtgatctgatggctttataaaaacagttttcctgcacatgccctcttgcctgctgccatgtaagatgtgcctttgctactcctttgtcttctgccatgattgtgagtccttcccagccatgtgaaactgtgagtccattaaagctctttttctttataaatccacctagtcttgtttatgtcttggcttgtaattgatataaatggataagccaaagaagaagataaaataaaatcataaacaatgttcaactaacccaagagaagtcgcaaaaataaggaagcagaaagaaaaaaaaatgaacgcaatattaaattggtgcaaaaggcattgtgttttttgcagttattaataaaagtaatatggcaggcattgtatcctaggggatcatagatatggtcttctcttcctcctcttacagctgtagcctggactccacactattcctgtttttcttgtacatataggagtttttctttctaaatccttccccaatatgcagtaggttttcattaatgctccaaaggcaatgatgtaaggatgtaaaagtaattaaagtcagaaaagagctgacaagatagaagatattaactcaatatgttaatatcactcttaatatcaatatattgaattttaaaattaaaattcagagattgtcagaatgggcaagaaacaagaccccatactgcctacaggaaacttaatttaaacatatgcagattaaaaataaagtgctaaaaatgatataccatgcagacattaatgaaaaagtgggaataattattaataatataaagcaaagtagcattcaaagcaagacatattattaggaataaagaaaaatactaggtaatgatagacaggtcaattctctaagaaaatataaaagtcttcaatatgtgtgtacccagcaataaagtttcaaaattcataaagcaaatacagacttgaaagaatagtgaaatccatgttaggctaaactaattgcacgctgatggctctattatttttttaaaaaatgccctggggcataaatttattccatggcttaatccaattaaggttggggaagggtaagtttcagtgcccatctttgaatgttttctgacaccaggagggttctaaactgtctttccctctggttctctctagtgaaccagctggcctatggtttagcttgtcactcttaattcagagaaactattgttttgaagcttaggtttacacttcccacattttgtttcaaacagtcagtttctttgagaagagatctgaagctctctgctcttatggactgcctgttgccctggacagacatctctgatccactatgttaggtatttggtagggcaatagcctctggtctacttgtcttacttctttcaatgtgaaacttctgcactctgagtgagctggaatgaaagtgatcaggggcccatcattattggtattccatgctcgggggaaaactttcatcctatgcatgaaggctgggtgggaaaaggaagggaaacccagatctttagggcatattcaccaagaatttaatctctgcattttggagttgggtgagggataagtaaaatttgtggcctggccttctcagtgagatacttgtgtcaggcagttcttgcaatgttatataaaatatgctttgtaaatgggtaatttacaaagaaaagagatttaattgtctcacaattcttcaggctgtacaggaaacatggcactggcatcttctcagcttctggggaggcctcagggagcttttactcatggcaaaaggtaaagtgggagcagatatttcacatggcagagcagaagaaagagagagagtaggggtggggaggtgccacacacttttaaatgagcagatcttgtatggactcagagtaagaactcacttatcaccaaaaggatgggccaagtcatttatgagaaatccatccccatgatccaaacacctcccactagatccacatctaacattggggattacatttcaacatgacatttgggtagggacaaatatccaaactacatcattctatccctggctccttcaaatctcatatccttttcatattgcaaaatacaatcatgtcttcccaacagtcccccaaagttttaactcattccagctttaactcaaaagtccaaagtctcggccaggcgcggtggctcacacctgtaatcccagcactttgggaggccgaggcgggtagatcacgaggtcaggagatcaagaccatcctggctaacacagtgaaaccccgtctctactaaaaaatagaaaaaattagccgggcatggtggcgggtgcctgtagtcccagctactcaggaggctgaggctggagaatggcgtgaacccaggaggcggagcttgcagtgagccaagattgcgccactacactccagcctgggcgacaaagcaagactccatctcaaaaaaaaaaaaaaaagtccaaagtctagtttgagacaaggcaagtcccttccacttatgagcctataaaatcaaaaacaaattatttactcccaagataaaatgaaagtataggaattgggtaaacatttccattccaaaggaaagaaatcagccaaaacaaaggggctaaagttcccaagaaagttcaaaacccagcagggcagctattaaattgtaaagcttcaaaataatctcctttgacttcatgtcccacaccaagggcacacttccgtgagggatggactccaaaggccttggaaggttctgcccctgtggctttgcagggttcagcccccacagctgttctcacaggttgttgagtgcttctggcttttccagatgcagggtgcaagctgacagtggatctttcattttggagtctggaggacaaaggccccccttcccacagcttcacttggtagtgccccagtgtagactctgtgtgggacatccaaccccacgctttcccttcatactgctctagtggaggttctctgtgggggctcctgccttgcagcaggattctgcctgggcacccgctttattatacctcctgtaaaatctaggtggaggccaccaagcctttacttttgctctctgtgcaccaggaggcttaacatcacatggaagctgctaaggcttatggtttgtattctcttaaagtggcagtttgagctatactggggcccctttgagccctggctggagttggagaggcaaggatgtgggaagcagtgtcctgaggctgtgcaaggcagtggggccctgggcctggcccacaaaaccattcttccctcctaggcatatgagcccatggtggaaggggctgccttgaagttctctgaaatacctttgaggccttttccctattgtcttgtctattagcacttggctgtcttttagttatgcaaatatctctagcaagtggttgctccactgcccacttgaattcttttttttttttttttgagacagagtttcactcttgtcacccagctggagtgcaatggctccatcttggctcactgtaacctccacctccaaggttcaagagattctcctgcctcagcctcccaagtaggtgggattacaggtgactgtcaccatgctcagctcatttttgtatttttagtagagatggagttttaccatgttggctaggctggtctcaaactgctgacctcaggtgatccacctgcctcagcctcccaaagtgctgggattacaggcgtgagccactgtgcctggccaaattcttctccagaaaaacttttttttctctgccacatggccatgttgtaaattttccaacctttaatgctctcttatgcacttttattaaaagtaatggcaaaaaccacaattagttttgcaccaacctaatataaagaaaagaggtttgattggctcaaggttctgcaggttgtacaggaaacatggcactggcatctgctcagcttctggggaggacattggctccaatgcaatgcctcacttgtcttactgagttttagtagattttcttgtgtaaatgcttatttatttctacaagactttaggataacttccagacactttaaacggttggcgatagtcagataggtagataaatagatagataaaatacatctatatactatctatttctccctgtctctgtctttctctccaaatatgtatcaatcaattatgcatatttctctggggagtggttttgcagactcttgactgggacctaagggaagagagactcctcatactgtcatcctggtgaaatttgtaatggcttttgatagaaattatgtttgagcatatgccagggtagaaacagagaaccatctaccctttatagagttgagtagaggcaggaagtcagagccagaggtaattgtaaaaatattagttccctgggagtttatggaaatcttgggagagcattagaatctccaggatatgagatagggatgtagaagaagaatcaacttcacccattccttcctaggtttcagcacagaagagtctctggcttagtgggaagattatagctttgagatatacgccattaccttggaggcagattccacaaagaatatgccagaaagacagttgaaccgaacctttgtacaactctctggctgcataacttctccccttagaccaaaaaaggaaagcccctatgaactgaggaactggtatttatctctggtttggcaaggagtgaattgtacacagcctaggaagaatttcccattaaacttagtttctgcattttaaaacccttcagaaaagcttaagtataagcttatttcttacacttaaaaagtaggcttttcaaactgaaaagacaagtccaaactggtcccttttatcagacaggtctgtatctgggggtggtttcagcttcagcaagactgattttaggggtaaaatggacgctttcaggaagctaatagaaactcttggggaaagagggcaaagatctaattgctttgttcacagttctgtaattttgttggagctctgtggttgttcacacccttgtgccacattaataattattgggccatattattaaaccaatttcagctcttgggagaccaaagtgttccttggcagcactggccaatatgaaaaacaatatcaaaatgttaacactggaagagcttggagtccttctagaatcaatgttttcaacccacattctgtagagcccaaaggttctgaagagagacttaggtgtgaggagaactagggggaagctgaggaaatagtccaataaaacctctcatcccttcaaccagagcagttctacctatttgttttatgttttgctgggattccatatgagattttgtttaatataaactagtacttttctgccttagaaaaaagcccacgatggcaactactgatccagttcagatgttggcaaacattctttgtaaagatccagaaagtaaatattttagacttcaggaccacatattcccatcacatattcttttttttttaaatcattttaaaaaaagtaaaaaccattctcaccttgcaggtcacatgcaaatagggcagaggaatgacctagtttgactatgccgttattttaggtgatgaaactagagtctggagagggacggtatcttctttaaccacaaaataagcaaatagctgagacaggctttgaacctgcgtataaggagcactctgcagaaacataattcctgtgtttcctaacaaggctctctgcttcatcagccacagtcccaacctgttttgtgatctaaccattgtttattgcaacaacaacaaaaccttttcagtttctctgctacaaaattgacagccacagcacactaagcattttttcaaccaggaaaacgtacgtacatttggatattttcccaaggcagcatcgctttatccaccataccttctcaatctggaaccaatttatgggatgtttctctgagcattgtgataccctgggaagagaactcagccacaaagtgccagacttctgatctacagagctgtgagctataaaagtgggtattgtttttagccactaaattcatggtaatttgttatgcaacaatagaaaataaatacaacactcctccttgccttgttgcagagtaagaactcaatttccacttgatagttgggatcagtcatctcagtcactaactttattgtttacccaatgtagtggcatgaggaacgcaaggtggccaggtggcagtctcagcttctattttaataaaaccatttttatgtactctggtggaaacacacacctcctaggcactaagatctttgaaccagcagaggtcaaagtgttaccgagcaaaagggcttactaaacaatgggttagaagccaaaactatgacaccaggtttttgagaaaagaaaagctttttattgtaggttgaccaacgagacaggagtccagctacaatctgtctccctgtgctggcttttaggtagtaattttattatgaaagatttaggtggtggatgctaggattagtagatgactggtgactgaaaaggggaggtctagaaagtcctcagccatatgcagttatttcttcatgctatttcatggattacatgtgcaaatccaggggaaattagtatgaaacatgtggtggaagttcagactgtgatatcagtaagcttgttctgtgcagactccagttggtatattggttacaatttcagctagttttgttatcttacaagctgagggaatttcagagtttcgacaaattgttttgttttttatctgccatcctgtaaattcaagaatttctcttagtcactggtttctttaactctttggggcatggttcaaaagttgtaaaattttgctattgaatttttaggggtaatagtgaaaggagccactcccatttccattgtttgatgtccagacatatgtcttctaactatgggtaaataataccatataccgaatgatgaattacagcatataacatatcttggagggcattacttcagctctgcaaagggttggcacccagtagacgccataccattcctgatggacatagaaagtcatttcacgtatatattatatatacacattcctactactggcatgtggaattctgggtagggtaggcatttgtttactctgggagatattgccaaaacgtttttcaaagtagttcacttaatgaacagagttctagttcccctacatgtctgtcaacatttgatattgttagtcttttaaattttagccattctgtaggtatacggtaataagtctcattgtagtttaatgtgtactttcctagtgactaatgcattgagcacctttcatttactttttggccacttagattttctcttttgagaagtacctgttcaaaccttttgctattttttttattatacttttaagttctagggtacatgtgcacaatgtgcaggtttgttacatatgtatacatgtgccatgttggtgtgctgcacccattaactggtcatttacattaggtatttctcttaatgctgtccctctctcctcccccttccccccactccatgacaggctctggtgtgtgatgatccccgccctgtgtccaagtgttctcattgctcaattcccacctatgagtgagaacatgcggtgtttggttttccatcctcgcgatagtttgctcagaataatggttcccagcttcatccatatccctacaaagaacatgaactcatcctttcttacggctgcatagtattccaaggtgtatatgtgccacattttcttaatccagtctatcattgatggacatttgggttggttctaagtctttgctattgtgaatagtgccacaatacacatacgtgtgcatgtgtctttatagtagcatgatttacaattctttgggtatacacccagtaatgggatcactgagtcaaatggtatttctagttctagatccttgaggaatcaccacactgtcttccataatggttgaactagtttacactcccaccaatggtgtaaaagtgttcctatttctccacattctctccagtacctgttgtttcctgactttttaatgatcgccattctaactggtgtgagatggtatctcattgtggttttgatttgcatttctctgatgaccagtcatgatgagcattttttcatgtgtctgttggctgcataaatgtcttcttttgagaagtgtctgttcatatacttcacccactttttgatggggttatttgattttttctcgtaaatttgtttaagttctttgtagattctggatattagccctttgtcagatgggtagattgcaaaaattttctcccattctgtaggttgcctgttcattctgagggtagtttcttttgctgtgcagaagctctttagtttaattagatctcatttgtcaattttggcttttgttgccattgctttttgtgttttagtcatgaagtccttgcccgtgcctatgtcctgaatggtattgcctatgttttcttctagggtttttatggtttaaggtctaacatttaagtctttaatccatcttgagttaatttttgtataaggtgtaagattatctctattgagataatcatgtggtttttgtctttggttctgtttatgtgatggattacgtttattgatttgcatatgttaagagagccttgcatcccagggatgaagataacttgattgtggtggataagctttttgatgtgctgctggattctgtttgccagtattttattgaggattttcgcattgatgttcatcagggatattggcctaaaattctctctcttttttttttttttttgttgtgtctctgccagcctttggtatcaggatgatgctggcctcataaaatgaattagggaggattccttctttttctattgattggaataatttcagaaggaatggtaccagctcctctttgtaagtctggtagaattcggctgtgaatccatctggtcctggagtttttttggttggtaggctattaattattgcctcaatttcagagcctgttattggtctattcagggattcaacttcttcctggtttagccttgggggggtgtatgtgtccaggaatttatccatttcttctagattttctagtttatttgcatagaggtgtttatagtattctctgatggtagtttgtatttctgtgggattggtggtgatatcccttttatcattttttattgtgtctacttgattcttctctcttttcttctttattattcttgctagtggtctatgtattctgttgatcttttcaaaaatctggttcctggattcattgatttttttgaagggttttttgtgtctctatctccttcagttctgctctgatcttcattatttcttgccttctgctagcttttgaatgtgtttgctcttgcttctctagttcttttaattgtgatgttaggctgtcaattttagatctttcctactttctcttgtgggcatttagtgctataaatttccctctacacattgctttaaatgtgtcctagagattctgatatgttgtgtctttgttctcattagtttcaaagaacatctttatttatgccttcatttcattatttacccagtagtcattcaagagcaggttgttcagtttccatgtagttgtctggttttgagtgagtttcttaatcctgagttctaatttgattgcactgtggtctgagagacagtttgttgagatttctgttcttttacatttgctgaagtgtgctttacttccaactatgtggtcaattttggagtaggtgtgatgtctgctgagaagaatgtatattctgttgatttggggtggagagctctatagatgtttattaggtctgcttggtgcacagctgagttcaagtcctggatatccttgttaaccttctgtcttgacaatctgtctattattgacagtggggtgttaaagtctcccattattactgagtgggagtctatgtctctttgtaggtctctaaggacttgtcttatgaatctgggtgctcctgtattgggtgcatatatatttaggttagttagctcttcttgttgaattgatccctttatcactatgtaatggccttctttgtcacttttcatctttgttggtttatagtcagttttatcacagactacaattgcaaaccctgctttttttttttttttttccatttgcttggtagattttcctccatccctttattttgagcctatgtgtgtctctgcacatgagatgggtcttctgaatacagcaccctgatgggtcttgactcttcatccaatttgccagtctgtgacttttaattggtgcatttagcccatttacatttaaggtttatattgttatgtgtgaatttgatcctgtcattatgatgttagctggttattttactcgctagttgatgcagtttcttcctagcattgatggtctttacaatttggcatgtttttgcagtggctggtatcagttgttcctttccatgtttagtacttccttcaggagctcttgtaaggcaggactggtggtgacaaaatctctcaacatttgcctgtctgtaaaggattttatctctccttcacttatgaagctaagtttggctggatatgaaattttgggttgaaaattcttatctttaagaatgttgcatattggcccccactctgttctggcttatagaatttctgttgagagatccactgttagtctgatgggcttccctttgtgggtaacccgatgtttctctctggctgctcttaacatttattccttcatttcaaccttggtgaatctgacaattatgtgtcttggggttgctcttctcgaggagtatctttgtggtgttctctgtatttcctgaatttgaatgtttgcctgccttgctaggttggggaagttctccttggtaatatcctgcagagtgttttccaacttggttccattatccccgtcactttcaggtacacctatcaaacgcagatttggtttttttcacatagtcctatatttcttggaggccttgttcatttctttttactcttttttctctaaacttctcttctcgcttcatttcattcatttgattttcaatcactgataccctttcttccacttgatcgaatcggctactgaagcttgtgcatgtgtcacatagttatcataccatggttttcagctccatcaggtcatttaagggcttctctatgctgtttattctagttagccattcatccaatcttttttcaagatatttagcttctttgcgatgggttcaaacatcctcctttagctcggagaaggttgttattacagaccttctgaagcctacttctgtcaactcatcaaagtcattctccatccagctttgttccattgttggcgaggagctgcgatcctttggaggagaagaggcacgcggcttttttaattttcagcttttctgctctggtttctccccatctttgtggttttatctacctttggtctttgatgatggtgacctacagatggggttttggtgtggatgtcctttttgttgatgttgatgctattcctttctgtttattagttttccttctaacagtcaggaccctcagctgcaggtctgttggagtttgctggaggtccactccagaccctgtttgcctgggtatcaccagcagaggctgcagaacagcaaatattgctgcctgttccttcctctggaagcttcatctcagaggggcactccgctgtatgaggtgtcagtcagcccctagtggcagatgtctcccagttaggctacacgggggtcagtgacccacttgaggaggcagtctgtccactctcagagctcaaactccatgctgggagaaccactgctctcttcagagctgtcagacagggacgttttctgctattttttaagattatcacaatgtgtccttctctctcttttctttctctctctctttaatacagtattattgggtttattttgtgaatattttctcccactctatggcttgcctttttgctctgttagtggtgtgttttgatgaacaaaagttttatattataatgaatttcaatttttcaatattttcttttatgttttgaatattccatgtttggtttgagaattttttgccttctgcaagataatgaagatattttcttgtgttttctttagaagattaactagtttactttaaaatttaggtctattagctaccttaaattcatttttggaaacagtgttttacatttttccatacaaatatctattgacacagacaaaatgtcttctcttaacacttctgtttaaagttgtacaggaagccctagctaacacagaaagcaaaataaataaataaataaatgaataaataaaatttataaatatcagaaagtgtatgtagaaaatccgaaataatgtacaaacaaaatattcaaattaatgtgtgaattagcaaggtcactgaatacaagttcaataaacaataaaaaatgcatttctacctcctagcagcaaacaattaaaaataaaaatttaaaacattaccatatgtaatagcatcacaatcgtcaaatactaaggaatacacttaacaaaaggtgtgtaagacctccacactgataactacaaaattgctgaaattaaagacacttaattatagagatgtatcatgcttatatatccaaaacaaccctcataattttaagatttgttttccacactgattcatacattcaatagattcaatgcaatcccaataaaaaccataaagggttttttgggatgtgggctcattgaacaactgcttctaaaatttatatgtaaatacaaagaaccaataaaattcaaacaaccttgaagaagaagaaaattggaggacttacatggttgcatacaaagagttactatgtatctttggccgtgcgcagtggctcagcctgtaatcccagcatcatgggaggccgaggcaggggaatcacctgaggtcaggcactggagaccagcctggccagcatagcgaaaccccgtctctactgaaaatacaaaacttagtggggcatggtggcgcaagcctgtagtcccagctactcgagaggctgaggcaagagaatcgcttgaacccggaaggcggaggttgcagtgagccgagctcgcaccactgcactctagcttgggcaacagagcaggactccatctcaaaaaaaaaaaaaaaaaaaaaaaaaaaaaaaagagttaccatatatcttcagttaattatgacatgtggtattggagttcagttgggaaaagaatggacttttcaataaatgttgcttagatcaattggatatccttatggaaataaaccattttcttttaaactaagaaaatgtttttttacttgtatgtgaaatcaaaaacagttgaactcatagacaaagagtagaaggatggttaacaggagtcagagggtgaggaaatgggagatgttggctaaagggtacaaacttgcaattatgagatgagtaagttctggatacctaatgcatagcatggtgactatagttaataataacgttgtatacttgaaatgtactaaagagagtgtatcttaaatattctcaccacacagacaaaaaaggtaatgatgtgaggtgaggtgcctgatacggcaattaacttgactttggtaatcatttcacaatgtgtatatgtatacctaaactttatgttgtacaactttattttattttatttttttgagatggagtctcactctgtcacccaggctggagtgcagtggcatgatctcagctctctgcaacctctgcctgctgggttcaaacaattctcctgtctcagcctcctgagtagctgggactacaggcatgcaccaccatgcccaactaattttttgtatttttagtagagacggggtttcaccatactggccaggctggtctcgaactcctgacctcgtgatccacccgccttggcctcccaaagtgctgggattacaggcgtgagccactgcgcccagcctgttgtacaactttaatacatacaattttaatttctgcattatacttcaagaaagctgaaaaaaaaagttttgtccacgggtgctgaggtaagtgtcaagcatgaagcaaattctgataaatggaaattatttgaagttcaaattttctgtatactgaaatatataacaattttactctaatattgtcacagtgctgtcttttcctcctcatttagaggaacctttctttgacaaatatttttacatgacaaaattcatcaaataagttgtttttgtatatagatccttttgaatgtttggctacatttagatattgtaaaatcataaaccttctcaatttaatttaatttcagtatacaatataaatgcattcaatccatcaaaagattgctcccaaatatcaacagaataaaaacacaatgaaattcaaaattaattcttgtataccatttgatcacttatttaatttgttgtgttccttctttgctttcttaggcataaatttcactaacttcctgcttgcaaattttgttttcaataattgccatatgctcaaagtttccaaaagctgaaattgaaattcaacgaatggctctttatttgttgaatactttgattaaatgttttcagctaattttgaataaaatgcaacaaaacttaaaagactcatttattaaaaaaacatataatatcattgaaagaaacttaggttaatgcacaaattaattcttcaatggctcaaatatttctaagatattattgctgatgggaagcaaagaaagaaactatttctatgttgctgcatttcctgtattcaacattctttccattacaaaattttttagttcagttatgttacacacacacacacacacacacacacacatatatatatatatttgtaaattcttacaactgcagcttctgatttgattgttaggcaatcacagtttttttggacacaacaatgtattatgtgtgtatcaaactgatccaagtacatcatgttctgtttcttaactttagtatgatactatattccaccaaaattggtattcctattattactgtaaaactgaaaattttatcttcactgctgacttttaactgataatatggcttggctgtgtccccacccatatctcatcttgaattgtagttcccataatccccacatgtcatcggagggatctggtaggaggtaattgaatcatgggagtggttactcccatgccgttctcgtgatagtgagtgagttatcacaaggtctgatggttttataagcagcttttccccctttgctcagcacttcttcctgctgctatgtgaataaggacgtgttcgtttccccttctgccacgattgtaagtttcccaaggcttcttcagccctgcggaactgtgagtcaattaaaactcttttctttataaattactcagtctcaggcagttctttatggcagcatgagaacagactaatacaagtgactaatgtcagatttttcacttttggtaggatgaacctccaaatgttttacattgcatccgttatttggactaaaaaaagtattgttattggaattaagttaactgactttgttgagttgaatcatccctctgacataaaactgacatattttaacttttcatgaaggtcttctgctgatggacccaatatttttaatagatatcacattagctttcttacatgcacaagaaaatttgaactgaacgtaaaagttaaattatttgccttaaaattcatgttttacagagtgttatagacacacaccttttgtagcatccagtgttagattattttcattcaatacagtaactactaacttttgaggcagatatcagtgcctcttcagcggacctgggtctttggttttcatgtgataaccatcattatagctccactggtgattcataaatgtcaacaaacattttatgcatgtcacatatttaggatgaactttcttgataaatggaaattcattatttaaattttattaaatatgcatttctattttttaagctcattgctgggaaaggctttgcatccaaataaacattataaaaagtaaaataaacagttgcaaattaatatataaaaaatgacaaggcactctatcaaaaatatttagattaatgtctatatacttctattaccctcacatgtttgatgtatatttaacctatattttcttacattctccactaattcaatcttgtgtggtctggcagcttcctacatctcccaggataagcacaggccatggcaaaactgacttgtgtgagtccaccaagtggccagcagggacagcaggcctgaatacctactaggcccagacactggaaaatgaaagctagctatctctagcctctggagtcagaacacaatacattttaccagtgaccgcccatcatgctgaccatgaaagggagatgctaattaattgcagctggaaaggggtggtatagcatatgctctcaactttccagtccatatccccataacctttaccatttcactttacagcatcccagtttccaattgctaattcttgcatctttttgcttaaaggctatctctttccactgaagccgtcatctaaggtgcaaaagtccccccacacacgtgggagcatcccacaaccaatgattgccagggattgaaatatacataccccagcttttttccccttgaggaaagaattcttttttgtttttgagacggagtcttgctgtttccaggctggaatgcagtgccgccatcttagctcactgcaacctccaacttcctggttcaagcgattcttctgtctcggcctccagagtagctgggattttaggcacatgccagcacgcccagctaacttttgtatttttagtacagatagcgtttcaacatgttggctaggatggtcttgatctcctgatctcgtgatccacccgccttggcattccaaagtgctgggattacaggcgtgagccaccatgccaggccgaggagatcattctaaggcatgtttggcaatggtttcccagaattttactagcagcattaagctctaagttcttacagtttgttaatgcattacttattggatgttttcccttatcatactttcctactcatctcctagtttttccttcatctcttaaactgcttttacatcaattttgttttactcagaatttgattatggagaaatccaagtaaagacatacagtaccagaagtgttcctaggaagtagatcctcagaatggaattatagaactggtcacttgacagccagattactacaaagatgaaatgttacaaaatcagagacattggtctagaaaagaagactgtggatgaacctgtacagtgggcacaaagcacacagaactttatgtttcacattaatgcctatcagagagtatccattgcatagaagacaccgaacaaggagctggatagatgagctgttcagtaggggtcagccagcctctgttttgggtcactcaagggcttgtataatgtgcccacaatcagagcagccatgacgatagagatggggtctatgtatgtgtacgaaaggatgaactctccctcactaagactgatttagttattgacgttgatgaacatccaacctattatcagcagagattcatgctgagccctagatatattggacaaatcttgaaggatattagttaatggaaattgaaaacattgaatcacatctatcttgctatgatctgaatatttgtgtttaacaaaattcataggtgtgatggtattcagaggtgagggctttgggatgtgatcagattgagggctctatcatcatgaaatggattagtgcccttatgaaagagatcctggagagctgactagccccatccaccatgtgaggacatagcatgaagggccgtttaggaggaatgggccaaaatggctttcatatttttaaacctaatccctgatatgaaagtattcagaggaaatttgaactgggcagagcccaccacagctcagcaagaccgctgtggccagactgcctctctacgcagggcatctctgaaaaaaaggcagcagaccatgtaccccagaacttaaagtatataaaaaaacaatcaggaaagaggagactagaaaaaaaaaaaaaagaaaagaaagtattcagaggtggagcctgaatttgctggcacattgatcttgggtttcccaacctccagaactgtgaaaataaatgtttattgtttataaactatccagtttacaatatttcttttatatcagcccaaatcgactaagatatacctctggcagtgatttatccctattgaattaacaatcatccaaggttgggtttgtcttccctgtcctcagtttcttgactagaaccactatccaagggctcattgtttggtttattgtcatgtaatctgacgctgactttgatcaaaagacctatattacagtgaagggggtacaataaggttatacattatgaggtccattgagcttaccataaacaatgtgacctagaagctggtagcctgataaaataatggaattgtctcccaaaggcatcagactgggtattatccttcaagatatgttatgtatgttgaactaataacaatttcatagtgctgagcaccctatagatagatgtatgggtctggaaaccaaaaggtaaaagtaggagggatccctctcaccatcattcatagtcactcacttgtatgatatgtgctctctgtctctacaattgtagaatttattggactaaatcttcttggttccagagaaggatgcttctaaaaggggacagagagcttcactaatcctaaaagcacaactcctacttgtttattttaggcttcttgtgcccatataccaacaatagacaaataatgagttactatactgtcagagatgattaaccctgattatcatgaagatattgagttgctgttacttaacgcaaccagggtgggtaagtggaagtcaagaggttcactgggacatccatttgcacttcaatgtaccgtggaaaacatatgtgtacactgtaacaacaatgaccaggcaatggtatagccaggagttcagttatctcagagatgaaggtgtggctaccctagcagacaaaggactgaaactagcaaaagttatggatcagggtaaggggaatatagaacaggtggtaaaatataaagataatgaaatcacttggatataaagagtgcaagaggaaaactatatgagatgctgttggtgcccagtccataaaccacctctttttatcccattggtccagagtagcacatacctgtatttcttttcttgaaggctttttcttattgccaaagctttgtttgctgtctgcagtgtagctaatgagtgccaggggattaataccccttggaagaagtcttcaaccaatgactgatcaaagtcagggtatacatatctcagtttcctcacactgtgggtaggataaccagaaggcaagcattttacactggctcccagagttttcccagcacaattacgcttcagttgccttcagagtagctggcttgactctacaccttttatttgctctttttcttcccttgtttcacatccttactcctcgagttgcattttccttcacctccaaaacaaattacttccatgagaatcattttctcaggatctgcttttggaggaccaaaaaaagttgagaaaagagagatgaattagtattgattgtctttcagacataatcacaggttaaattgagaaccatgtttggtgctaagacatctcatacattagtaaatgagaacctcacagaaactagaagtataaagtgcagttcttcaaatccatccaagcttattttaatgtgaacattaataataatatttggctaaaaatagaaactccaaaacaaatgctaaactgaatgggacaataggtataacatgggattgtcattggtaaattaggactttcagctatcctacaaatatactttgtgattatcttttgcaatttgaatggacctcattattggaatttcattttgggttccacattcctgtgaggttcaagtaacagatgcctggctgttctcctatgttttgactcttcacctctgctcaatgctgaagatatcttttcatctcagtcttctaggacctccaatgttctgacatgacctgaacctcagccatataactcagcatccaactttcatgagccttttaaatattttaagtttaatattttaagtttgaaattaagccttttaaatatttttgtctacttttaaataaataatcttcatacctttcatgtttttatgtaatttcttttccattgctttgatgtactttataaatatcatttccctaggacctcaaaagaccttggatattttcaatattccaggaaacattgtctgattaagaagcaaccacttctgaataacacagcttttaattcaatgtccagcttggaccttgttcagacttgactgagcacccttggccctcggggatatcctcctctctcaactccaggacagagtgacccccaattcacacaactcaagcttttagcaagaaagagcattttaattgaattccaattaaattccaattgaattcctagaccaaggcagttagtttgggtcttggtaatttgtcactgcctgtgggtggcctcttgagaggggtatgcttggagtatgtgtgtatgcatttcttttcttcttttggatgggtccagctaagaggtttatggtatactgagtcatacagacaaatagagctctagctccggccacattcctggattatcaactctgcataatatcccttccttaattaccaaggaatcaaggtctacttagcaaaaggatactcgcttagtaccagagttgactccttcatgacccttgaggaatctatgaaaagaagacatgtccatcttttttaacttgtgacctgacctctatgtccttccagaatactgcagttaattaaaaaaaaaaaaggaatggagaaatttaaagctaccacagacaacgtaatttaacaataaaaatattcacctcctgtctgttctatcttttgtggaaaatctgtatggctatatttttctctcattaaaggagaacagttttgtgcctacagagacagtttcactttgggagtttggagtcatccatggttgactctgattaatgcccactagattctttattgaaccagagatctcccttgaggctcttttttgtttgtttgtttgtttgtttgtttgtttttttccctctaatagaaccttacttgtattgtgagatttaggaatggttcctgtaagaatgtgaagcttgagtgaagagcaaaattttagaacaccattacagcctggctgggacccatatcgtcactaagtagcccagaccacagctcactctttccagtgagatcaggattcctgtcctactctcagaagtatggtatgcacagtgtgcccacacctaccaagaagcctatctcttccttccgtcttccccaaatcccatccttcttccatcctcttggaaacatttgaaaactgagcaaacctgcctttttttccattgtttttgattgatatgtaagcctaaaatttctccatgatgctcttcgtaatattcatttcatggttccaattgatcttatatcctcagcctcttcaaagaccgttgattttaacagcagcctgattctcctttaaggacacaatttccttttgtagctcacctatggtagtgatgataataacaatggcacaaggtgaccaattttcccccactataagttggaggtgaatatgatatgcagctcctttttcctctatagcatgtctgaccattttcatgagtacccccacccacctgccactccttgggagtgcactggactagaccatcattaggcattctgtgaacatcctctgctgatgaccttgtggtctattcatttttggcccaatagcacaggagtccccaacccccaggtcatggactgctaccaagtccatggcctgttaggaaccaggtcgcacagcaggtggtgagaagtgggcgagtgggcattaccacctgagcttcacctcctgtcaaatcagtggcggcagtagattctcatagaagccggaaccctgttgggatctaggttgtgcactccttatgagaatctaattcctgatgatctgtcattgtctcccatcacccctacatgggaccatctagttgcaggaaaacaagctcaggactcccactgattctacattatggtgagtatatactaataacaataggaacaaagcacacaacaaatataatttgcttgaatcatcctcaaaccacaccctgcccacatctgtggaaaattgccttccacaaaacccatccctggtaccagcaagtttggagaccactgcaataacacgtccctgttgactcagcatcctctgggctcttgcatatattgcagattcctctgatgctctgccaagtccttcatccagatgtttatctatgttagtctggcacattttaaaggtgtcatgacccccagcttccctcttcttcctcttctttatcattttcatgctgtaaactagacctgtctaaggtaggtttggaaggattgtcaggtttttttttttttttccagaaatctgttgttcttcgtattagtcctaagcatggagccccaggctattatttgcttctttccagcagttatcctactcttgtcaacccagtctctagcagtatttggttttaagctccttcctttgacttcagaccatgttgcactgatttatagttacccctttcaacgtgcttgatgttatctgtgtccagatcttttgcattcaccttgatccatattgcaggtctatttgatttgcaggacacatttacactagtaaatagtttaacaataacctaacaatctcttatgaaaaggaagaagagcagaatgggaattattatggtaagttctgtgggcggttattatggtagggctctgtgttctttacctcctttagtcctctaaaacccccataaaatttcattattatcacttttttagagattaggaaactaaatctcaaagagattaggttaagtagtttgtccaaggtcagagaaccagcaagagggagaagtaaaatttaaactctggcctgaatctaaagcacgtacttctcccaatactccaacatgccatctttgcttggatttttcaccaactcttataagatctccaatggggccaggtctcatgtgacctccatgtccccatacctgactgcttcacactggttctaaactacccctaatcaaagcctcccatttcttccagtgctgtgcctaactggacaatccatctagtttttgtttttttatcaatgattttttaacatggaaccatccatgttttcatctcatttgtggcacatatttctgttgtgtcttgaagtcaatgaattaacccactctcattttttttttttttttgctccagatgatcagatttattccttcctaaaatatagaagggcttctagtgaaaaaactaagtcttctggcttattcttcccattcctagctctctttcttagaggcaacactttatctcttcagattttttgtttgtttagtgggtttttttgaacgcatataatagttacttaactgtatcgaaataaaatgcttataaaattatctctagttattaaatttagactttattaagttcttagtatgatagatgaggactcagctttcttatgttatcttcaatgtcatcacaatctttaaaatagttaaccactctttttagttcttctattagttaatttttgagctttaatgttagataaagttagcatgtttttgttctatcaagtatagatatttcctctagacccctcaagttataagactgggatattaacacctctttctttccactctcctctatgccctcttagactctacttccatacttcccgtgttgtcttctttaaatttacatttaaaatgtcagactgatcatatttacattctgttctgtaagtatgagttttccatgccatgtgtatagattgattctaaaatttaaatatcatcagtgtcttcatcagtaaataatataaatattatttactgcagagccaagtaatgtgctatgtgcacatttacttacataatcacttgtccttcatctggtttctaattttcccctcctctgtacctttatcatgtccctaaggtcttttgatctctatctcaaggtttccatcaaatccgcaaagtcctcctttgtttgagttccatcccttctggagtcctgctcaatcctgaagtattctctaggcttgatgaccagctgtcacctgggaatttccttcattactctcttggattcgaatcacgattctatggatcccactttttcttctctcttcatttaaactttccagcaacttcctatgaacaaaatccactggcagtaatgtcctagccttgcttttattttatcctcacatttaattggtagtttggctggagttggagtcccctctgcccaatggaccgtattcaccttcttctggtgagcagtgttgcagaggagaagtctgagaccagcatggctcttcttcttttacagctgtactgttgcctttagcttttcctctctctggacacttagaaccatctttttatcctaggtgttttgatatttcataatgataacaaggtagctccttttaaaaaattcaccaagttaggtactcagaggggccttttaatgagaatattcatgttctttaacttttgaacatttacctctattatttatttgatagatttttcctgctttttctccagatttctctctcaaaatcctattagtcaagtggtagacctccagtctctcaaactttttctcactgccttttgctcttacagtatatgagatttccttaattttcaaaatcttccattctttctcttcttgaccatattttgaattttcaaagattcattatttgattgtccctttctccttaatttaataggtgaaatagtttttgatgttttttgagaattgtaattagatttaatttggttttccttttcagtttcctgaattatgtatttccttcaagattaacttgataatggtttccttcttgctatttttccttcatgctgaaagttttcctcaagggtcaatagatcctggacttttcatttatgtttaagaagtaagtgttagaaaagctgagacagggtttgggagtaaagcttgtttactaatagcattcattttaagtgtagtaggagtgggtcctgctgtgcatggagggacacataatgtgccagaacacaaggccacattgcttctctcactggaagcaatattttacattttattccacttttttaaaagtaagaaacaactaccttttccataaagcatataaaagcctgttttgtggtagacataggatcagagaagggaaaaaggtagttagtgtctgtgtacacatgttcacacccgtgtttaccatgccgcctacctccattacctcaggtatctctgagtcaagagtctgtctggagttcttctggggttcagctttctcctctaatctgttataccagtcaatatttctccatcaactttgagtctgcagacaggtgttgaagcattctgttcctaatgactttactcccattctttttgtttttatggaggcacatgaatttttacctaatttttcattgcaaagtggccttccaaaggtcgaggagtaaatgtacaggttcaatcctctatcttggaacagaagctctaattgacatttttaggagatctctctatgaaatctaaaattgttgaaatcatagaaacagactagaagggtggttaacaggggtcagaaggttaggaaatggagacaaattgatcaaagggtacaaacttgcagttatgagattaataagctctgagacctaatgtgcagcatgataacttttgttaataataatgtattccatacttgaaatttgttaaaagagtagatctcaagtgttttcaccaccaaaaagaaataaaagtaactactgaaagtgattgatatattaattagcttgattgtggtcacgattttaaaatgcatataatgtatacaaaaaatcacattgtacaccttaaatatgtacaatttttatttgtcaatcatatgttgagaaagctgggaaagaaaagatacccttggctgctgtggggtaaatggatgggacgtgggcaacagtaaatccagagagatcagtaggagactatggcacagtttttgagaaggatgacactgttttgaaacaagatagagaaaaatgttgtcatagtggctgcaccatttacattcccaccaataatgtacaagagtttgaatttctccacaacctcaccaacatttgttttttgtttttacaacaacaccatccttacaggtgttaggtgatacctcattgtcatttgatttgcattctcctgatgattagtgatgttgagcatctttttactttttggccatttgtatgtcttccttggagaaatacctattcagatcgtttgcctatttttaaattgggttatttatttacttatgattttgctattgagcttctttgttaataatttcaattttattctagaatcggggctacacacgcagttttgttacatgggtataatgcatgatgctagggtttccagtatgaataatcccatcactgaggtagtgagcagagtacccaatagttagcttttcaatccctgctcctcccccttctttctctttctagtagttcccagtttctatggttgtcatctttatgtctatgagcacccaacgtctagctcctacttataagtgagaacatacagtatttctgttcctgcattatctcacttaggataatgcatcctaagttatcctaagttaggatagctgcatccatgttgctgcaaagaacatgatttcattctttgttatggctgtctagtactccatagtatatacataccacattttctttatccaatccaccactgatgggcacctaggttgattctatatctttgcaattgtgaatagtgccatgatgaacatacaagtttgcatgtctttttggtggaatgatttattttcttttggatagatacccagtaatgggattgttgggtggaatggtagttctaagttcttcaggaaatctccaaattgctttccactgtggctgaactaatttacattcccaccaacagtgggaatttcctatatattttggaaattaactccttatcagatacatggtttgcaaatattttctcccattccattggttgccttttcactttattaattgttttctttattatgcagaagatttttagtttcacataatccacttttttatttttgcttttgttgcctatgtttcctatgtttttgttgtcatgtaagaaaattattgtcaagaccaatgtcaaggagatttcaggtcttatgtttaagactttattctatttttagttgatttttgtgtatggtgtaagataggcatccaatttcattattttgcatatagacatacagtttccccagaatcatttatttaagagactattcatttctattgtgtattcttggtgcccttcttgaccatattgcatgggtctatttcggggttttctagtctaatctgttagctgatgtgcctgtttttatgccagtacgatacttttagtaattgtgctaaaatcaagctaggaagctccctcccttggaccagtatttttccagtgggtccccaaggtattctcagtttttccttctttttttcttcttgtcatctcttcttctcccatggcaatcaagggggagagttattacagaatataagaagatgagttggattcaaacggacatgagtgttaatccttattttgccatttattaacattgagaccttgaaaaattaatttttctgaggctggaagaataatgataatattgccctgcattagctagctaaactgccatggcagagaccaaaacaacagtgagtcaaacaagatggatatttgttttgctctcttctaacagtcctgggagtgcaagaggctctgttccttccatcttattgctcaactgtcctttagacaaggtttctcaacttcagcattattcacatttggggccggataattcttcgctgggcagtgggggcaggaacggatgttgccttgtgtattgtaggatgtttagcagcatccccggtccctactaactagatgccactagcactctctccctggttgtgacaatgaaaaaaaatgtctctgaacactttcagtgtctcctggagcaacaaaaccactccctggttgagatccactgcctaaggatgtggtctttggtcacgtgatctaaagctggttcaccaagacaagctctagttcataggctagaggagggagaaaaagtggaaggcaaacaatttgcttttaggagagttatgtaaaggttacacatatcagttatgttcatagtctttgtgctaaaacttggtcatttggcaacagtaagccacaagggaggtccaaataaattgttggtctgctaaaaatcagggagcctctatttctaaaaggtttagggaaatatgaataatgggaggaggcatttagaagcctcattacctttacagaattgttatacaattaaatataataatgtacctacagtacctagcatagttatattgtaaatgcttagtaaatattacccttatctctctcctgcttctccattcccaagcacttgggcctatgtctttcacactgagatttagtcttaagtcattctgatacataaatattaataaaaatgattctctacaaccctgtgtctgggccaatgttggaactactcccaatatatagactactcccaatatatgtttctctttcaggattttgttctctttttcttttgtcctcagtagccttgccaccaacaccatctcccatgagcacacatgcacagggacccctatgcgatgatcctggaggtcttactctgaagtgaatgacatcttgctagtgatgacttttttttttagatggagtctccctctatcacccaggacatagtgcagtggtgcgatcttggctcactgcaacctccacctcctgggttcaagcgattcttctgcctcagcctcccaagtagctgggactacaggtacacaccaccacgcctggctaatttttgtatttttagtagagacagggtttcactatgttggccaggctggtcttgaacacctgacgtcagctgatcctcccacctcagcctcccaaactgatttaaattctggctcaagaacttcctagggatgtcactttttagttatttgtatatgtggtgacaacgtctgagctcaatgtcctcatctgaaaaaaaatggggatagtaatatttgttttacaaagttgtcgtaaatgaattggaaagtagaatgtgctaagcccctatttgcctggtcctttaagtattattccaaaaaattatttataataccctatacattctgaaatagtatctcaattttctagaaaagtaactgtaactaggtaaggcaaatttgtttgcctaaagttacacgtgcacacaatatcaggaggagaaatagatgggatttgaactcgggtctctctgataacaaaatcagtgccctttacattgacaaaggttttctttcatgtctttctctagcatagattactcaagaggctttaaactacttctgtcacttaaagtgggagctaaaggatgagaacatcatagaggggaacaacacatactggggcctatcagagtgtgaagggtgggacgaggtagaagatcaggaaaaataactaatgcgtactaggcttaacacctgagtgatgaaacaatgtgtacaacaaacccccgtgacacatgtttacctatgtaacaaatacacatcctgcacatgtacccctgaacttgaaataaaagttaaaaaaaaacccaaaaaacaaaaaacaagatgccctgtgtgtgaacttacagaatatgagacaatagcttccccaagtgggagattacagaacagaatgcacagtcctctctttgccttggaaagagtaatggtgtggagaatgaatggctcggggagtggtcttggccactgatctccccttcccctgcctggctcttaccaaaaccacaatcaggcaatccccgcaagctgagcttatcactgggatcctggcactgtcaaaggggctgacccaagcctgtcttacactgcctgcagctagttgcacaagccgctgacctacatggaaagcattgcatttcatgagaatgaaataggacattggacaagagctccacatttcctgccatcagatttacttcattttcgggaatggccctgctaacctatgatttcaaaggagtccaaagaattttggagtctagcaatcagttacactggtagtctcttttttcctctatgtctctgtgtggcatgttcctttctgcatgtatgcattcacatgcattcgtaaagacaggcttgaggaactctctgctccacatacaccaaggtgtcctgtggtatgtcagagcagctgtggtataacgaaaggagcacaatttttggcatcagaatacctggattaaaatcctaggcttcttacttgcaatgtgacctggggtacttctctgggtcttagcttttctaaatggaaaacaaagctaataaaccctacttcataaagctgctgaaggatttaatgatattacagatgggtgacagtgtgctcagtgtgctgtcatgaaaagagacctgagttcaaatccagaatctatctcctaaaggccatgtgaatcaggccaatgtattaaacttctcttttcttcagtttatgcatctctaaaatgggagtcctaatgatacctccacccagggtttggttttggggtcaaatgggacaatggctcaaatcctctagtgaggtccccagtatacagcagtgatgcagtaagttgctgtctttctagccttttttcagccattatgtgaaaactcattgtacacttccaagtggtgttcaaataaaagatgattctgtaacagtggtagttgccaaagtaagtgacatgactcattttaaggaacctagtaaaagacaggggtgtgcactttgaaacagagcaggctgaactgtgtctcagagagacttctttatgagtgtctgtttctgtaggtgggcccctggggcttcctcaccactgagttaacgggctgcttaatggaagcccctgattatgactcagtggagaacccacttgtctccctcttgtgatgcaaaaggcattttaactgcttttattcctctttagcatttactgctgcagtctaactgggtgggtcacaagaggattgtcctccctaagggtcatctcctgaattaccagccctaggtgccaatcattgcctttgtaaagatccatctcgatcctggatcctccctctcaccttattttataactggcttctcggcgtcataaggagcaaccagcttttcagtaataggtaaggtcaaacatggccctttggaatgtatgttgagggaccttcatcccaactctgagagccccacatgggacaagatttcatcttcatgaaaagtccagtggggtatgatatggtttggatctgtttccccactcaaataccatgttgacatataatccccaatgctggaagtggggcctggtgggaggtgatttgatcttggggacagtttctaatggcttagcaccatccccctagtgctgttctcataataaagttctcaagagatctggttgttttaaagtgtatatcaccttcctctctctctcttccccctgctctggccatgtgaggcgcttgctccccctttgcattctgccatgactgaaagattcctgaggccaactcatgcttcctgtacagcctgcagaaccatgagacaattaaaccctcttttctttataaattacccagtctcaggtacttctttatagcagtgcaagaactaactagcacagggtagaattttccctcaagctccttctctttcaagctcaagagaagtccttaagaagaactttaaattgtatcttcctgccctatcctgacttcctgcttagtatttcccaccacctccaccagccataccctcactgtctgtccacagggccattctgtgccatggctgccaaagccacccaccacagcattccacctgtgccgttcttctccatatgcttgtcctaggaacttaagggcccacagctgacaggaaattatatactggactaatttattgttaacaaataataatacattatttcaactttatttaaatcaaatgtatagtcatcaagcagcaatggtccaggtgctgtgtcaggcactatgtaaacagactacactactgtaggaagtttatactctttatctcatttaatactcaaaaagtaggcataactattcctgctctcaaggaaaaaactcagaccgagaaaggcttgccgacttgttcaaggttactaggccctctctattgcacaatttgtgggagggataccattcccatagtagcccatgcaaatggtactccccggatttatgttccaggacatagaatacaaagggaaaagtactcttggagtcacgcacagcagtggtttttttgtttgtttgtttgtttgtttgctttgttttgttttgtttttttgagatggagtcttgctctgttgcccaggctggagtgcagtggtgtgatctcggctcactgcaagctccacctcccgggttcacgccattctcctgcctcagcctcccaagtagctgggactacaggtgcccgccaccacgcctggctaattttttgtatttttagtagagacggggtttcactgtgttagttaggttggtctccatctccacagcagtggttttgatggtctcccagcaggtagtgacaggatcaagaactgaaactatttctaatattgaagttcagtgcttctacttcacatgccaaaaattaatctctagcataatgtcaactctctttacttataaatcacatgaaaaaggagtggttgttggcttgcataaaataacttggatattcaagtgaggatggctaatccaaacaatgcttagcattctcatttgcataaagagctttgagttcatatgcagtactgggagtagcactccaaggtgagtcctcacagttcagaaaggtatagccaataccccatataggaaggagccaggcaatggggaaagagcataggtcagacagagctgggcttgactttgcaatttgccatttgttagtgtgacctgggacaaaaaataagttcttctgagcttcacttttatctgttgcagagaacagtccatttacttaaacctagttaccttaggttcaccagataggattcactgaattgtttctaatgccataattcagtgcttttaaaagtgaataaaattttgaggttaccaagacaattttaaattaaatagataatttaaaaaatctcctttatcctgaataaattttaacaactactttcttcaattatagacactgtttatagtcaatgggtggatccagcattttaatcagttttactgattttaaagtcaatgtttcttctattatattcccctgtcctcaattgtttttagctcatcttttaaaaaaacttaaaataatatgtatttcagttatgctttagtgatttttaagtactcaatcaaattttcatccagctctggtcatatattttgtcttctactttgttggtggcttaagagtttgcaagtatgccagttcccccatgaggaccactgtccacacacacactccgctcttccccttcagctgctcaaagattctctatgctgtccttgtgagtttttgtgcttgaagaatcaatcagaattaggagatgtgctgacagccacacaagctgatttcctgaacctcttagtccacaggtccagaaaggaaatgcagactctcatttgtaataaaatgacaaggatattgtggtgggaaggcttgtctcttcctaatatgggccacttactggcatttttcttcatttttatgtgagttaaattcccattgatgtgggtgatgactgttggtcaaacaccactcctgcatctgggtccggcatactccctcagtgtcccagtggtaaacacagaggaattgaaagacagaatgacttcacctctgaagtcctatttggtgcacattttgatcccagggaccaaccatgcaggaggcctagggtgttttcactcgggcacaaccatgaaagtgttgtgtatttttttccccttggtggaaaaatgatggctttgctttcttgaagcattcctgttggcttattcatggaacccaaagagggcgacatccaaggagggcagcatgcagccttctgtttcccagccagagtcagggtttggcaaagagttaaagctgggagggaggcgggactgcccagtgcagtaggtgagagaagagttggccaaaaggtaggaaagacttgaaaccaaaatccacactctgatgtgcggggcctcccagtgagaaaaaacactcaccagacacccacatacttatttgtgttggaatagggtatgcagcgcccaggaggctgttgaaacagagtacggacacccttcaatgggctgggggagctgtggaaagcagggcttgggaggaggagtgaaggggagaatggccaaggcagggctgtgtctcccttgctgaaagaatcctttttgcaggtttacttgggatggagctataggctgtgtcctgtgtgggtggtgggtggcgagacttatgagaagtagggaactttcttttctctggagccagacagacttaggtttcactccagactccaccacttatgagcattggattcttggggaaaagtcacttaagttgtctgaacctcagtttcctaatgagtcaaatgggaataaaattgtggttttttaatgagtactcaatttggtattgcatatgaaaagttagccttggtgtgcctggccctcgtcaattttcagtaattagctgctaatttttcacgtgttaggtgacaggttgtatataggaagggcagtctcatagaatggtgttagagtgtctcctcctgggtataatttctggctttacctggtactgggcttatgacttaagcatgtttcttaacattgctaaacttcagtttattccatcataaaaagattatcatatcattctactttttcatcaagaggactagttgggataatgcatgaaaaacacttagcatagtgccttaataaataacaccataagagttgactgagatgctagcaatggtgaagctgtgattgcgtatagcttctgaagacagagattgcatagtctagaccatggttcctcactgagggtcctcaggagacatttgatgatatctggagacaattttagttttataacttgtgggagaatgggggagattgctattgtcatctaatggagagaaacaaagaatgctgctaaactttccacagtacactgaacagatctccacaacaaagaattaacaagcccaaaacatcaactgtgacaaggctgagaaaccccagtccataccaggtgctttggaaagacttaattgacataaagtagacatcggaaggtctacctgaattataatcagggataactaagtttttcagttgttaaaatacaaagcatgtgtcaccctctaggttgtgtatcttctagagaccttgccatagtcaccattatcccctgtaacttggcacaagttatgcatttacaaaatgtctttcaaatcaatgcataaagttgcctgatgagttccagtgcaaggttaaatattcaactagtatttgataatctgtagaggactttcaccttgaaacaaaatgggaaaatgggtcagtttttggagagagcatcacacagggtaatcaaaactggaactgagaaactaaagtagcagaaaacacaggaaagttactgcttggcatgtaccaccaatttgggactgggaaggctgggagtggatttgcctttctaattaggtttgacttgggctaatattgaagtgagcttttgttccctaagtagacaccagctgggaggcggtccaggaacgtgctgggtggtagggtgaagtcagcctgatattacacattttctctgggtgacccataaatagatcattcacacatggacatatgagaccagtctataaactcagctctgatgcagaatgtcctgagaggttagactcctgagtcactctgatgacagttcaaatccagtctccattacttgctcactgtgtggccttgcaaaagatatttagcttttctgagcctcacttttttctcaatctggaaaattcagatgaataatatttacttcaggaggttgttatgaaggataaaaaaaaaacaaaagagataagagattatgttgactcctactacagaaaacctagaaggggctaaaatggattacaccatgtattgatttagggaataactcccccaagtagatgaattattgcttacttaatttttgtattacgtctagtacctaccaacacttacctatcccattgtatgggctcctaaatgctcttgcagataatcccttctacctcaccacaacaattgtccttagaaatacttcagagcattcctcctaaaggataacaccagtcaaaccactccaaaatttggaaatgcttcttgtgacctacagaagatagtctaaaattcttggcaaggcattaaagccttcatccatctagtctccaccaatgctccacccctaattcttgccaatgcctgcatccccacacacaggtaaattctgggccacaggctttccaggttacttgctatttccagaatattcatataattgttattcctttaggtctttgctcctgttctttcctcagcttgaaccaatcctttttaatgtagtcatattaagtttttgatgcccaggtcaaagctcatctttttccaggaaacctctcttcattttacttctcgtagttggaattatatttcttattccatgggcctccaaagcacttgctggctttatcttatgatgtctgtgctttctatccatgcttttatggcagtttagctcacatctttacccctttgtgaaatgaggagctttatacaaacattagaaatctttgtgacccttcctcccatcactctcccttcacctagaatagtatcttgcactggggaggcactcgacaaatgttggattaagcctcaaaattatcaaggagttcatcccttaagggaatttctgttgccaaaggtgtatccctttatcataccaaaatgtccccccaaaagaaggagtgctggaataaatttcattttctctacaaccagagcaaattcatgtctaccctccactcttgaggtaacttgaaagtccatgggttacttcttcatatttcctacatctcaatgtactccttagcacttttaaagagtacagtatggaaaaaaaagggggcagaaaagtctactggagaaacatgacaaacaccaccttagccaaatgaccaagactaacaccaacagtggtatgttgtgttgatacccttcatatagtacaatgagaatggagcttctcctttggactttctccacgaagtgctgtataatcataggagaaacatcagaaaaactcaagttgaaggatattctacaaaatacccgatctgtattcctcaaaactcttgtgactattaaaaagcaataaaagtttgagaaactatcacagtttctcaaagaggagaaagaggagcctaaggagtcatgccatctaaatgtaatgtatcctgaatgggatcgcgggacagaaaaggaacattaggtaagaactatgggaatttgaataaagtgtggattttttttattaataatgcatccatattggttctttggttgggacaaatatgcatagtgaagttagctgttaacaataggggaaattggtgtggggcatatacacactctctgtactacttcgcaattttgttgaatgcctaatgagtaaacgataaagggtatttggatttgacctccctatgaagaattagaaaaaaactgaacagtttaaaacatgtggctatagcatagtgatcaataaccctaagcaagtaatttgaacctctttgtttactcattcatttaataatagtttttagatgtgtgtaatgtgtggcataggacaaattaatctatacaagatgcctagcacacagcaaatgctcaatgaatgttgccttccttttgttgtattaggcttgctggcaagtcacttaacctctctatggacaatgaggtatttgctattgaatggaattgaaagaacatttatttaaacaaaaactgtagttattactgccttctaattgagtgggatagcgtaatctctatcagcagggaaataaatatctacactctcttcttccagttacagagactgatggaagaacaggaaagataaaaattttaaagcttctcacatttcttttgtgctgataaaaagtgagtccaagggtagatgaacctttgttttagcaggcacattaatgaaatggtattttaaaaaatagacctataatccaatagagggtggagagttcacaacagctgacccattctgcataattaagttaggtaattaagatgaaaagagcataaaaatgtgtgtgtgttccagtgagtagtgttgagctacagagcaggaggctgcaacctttccagaaatgtgaccagtaagagattttctacggaggcatagtccaaggacttttatctacttattttttcaggatcttattcaagatacattttatttttcttttcttatttaactgttattttagtttcaggggtacatgtgcaggttggttctatagataaattgcatgttgtgggagtttggtgtactgattatttcatcattcaggtaataagcacagtgcctgataggtagtctttcagtcctcaccctcctcccaccctctaccctcaagtgcgccccagggtctactgttcctttctttgtgtccatgtgtactcaatgttcagctctcacttatatgtgagaacatgtggtatttggttttctgttcctgcatttgttcactgaggataatggcctccagctgcatccatgttgctgcaaagagcatgattttattatctcttatagtggcgtagtattctgtgctgtatatgcaccacattttctttatacagtctactgttgatgggaatttaggttgattccttgtgtttgctattgcaaatagtgctgcaataaacatgcatctcttcatggtagaatgaattatattcctttaggtatacacccagtaatgggattactgggtcagtatttctgttataagtttttcgaggaatcaccaaactgctttccacaatgggtaaacaagtttatattcctatcagcagtgtataagcattccattttctacagaaccttgccagcgtctgttatttttttggctttttaataatagccattctgactggtgtgatgtgttatctcattgtggttttcatttgcacttttctaaattagtgatactgagcattttagcatatgcttgttggtcactagtatgtcttcttttgaaaactgtctacccatgtcctttgcccactctttaataaggttgtttgttttttgcttgttaatttaagtttctgatagattctggatattggacttttgtcagatgcacagtttgtaaatattttattccattttgtaggttgtctgtttaatctgttaatacttttatttatttatttattttgctatgcagaagctctgtagtttaattagttcccattatatcaatttttgtttttgttgcaattgcttttggcatcttcttcatgaaacctttggcagggcctatgtccagaatgttatttcctaggttttcttcaagagattttataatttggggttttatatttaaatctttaattcatcttgagttgacttttgcatatggtgcaaggaagggatccagtttcagtcttctacatgtggctagtcagttattccagcaccatttattgaatagggagtcctttccccattgcttgtttttgtcaactttgccaaagatcagaagttttcaggtatggagccttatttctgggttctctcttctgttccatgggtctatgtgtctgtttttataccaataccatactgttatagttattgtagccttgcagtatagtttaacgtcaagtaatgtgatgtctctaggtttgctatttttgcttaggatgcctttggctatttgggctcttttgggttccatatgaactttagaataatttttttctaattctgtgaataatttgattggtagttggatagaaatagcattgaatctgtacattgctttgggtagtatggccattttaaaaatattgattcttcctatccatgagcatggaatatttttccatttattggtgtcatctctcatttctttctgcagtgttttatagttctccttgtagagatctttcacctccctgtattagctatatttctatgtatttggtttttttgtggctattgtaaatgggattgaattcttgatatggaactcagcttggacattgttagattatagaaatactactgatttttatacactgattttatatcctgaaactttactggggttgtttatcagatctaggagcttttgggcagagactacggggttttctaagtataaaatcatatcatctgcaaactggggtagtttgatttctcttcctatttggataatttttacttatttctgttgcctgattgctctggttagaacttccagtgctatgttgaacaggagtagtgagagtgggcatccttgttttgttccagttcttaaggggaatgcttcccacttttgctcattcagtatgatgttgactgtgggtttgtcatagatgtctcctataattttgaggtatgttcattcaatgcctagtctgttgaggcatgaagggatactgaattttatcaaaagtcttttctgcatctattgacatgatcatgtgcgttttgtttttcgtcctgtttatgtgatgaatcacatttattgatttgatacattgccatgaaccaacattccatcccaaggataaagcctactcaatatgatgggctagcttttttttttaatgtgctgctggatttggtttgctagtgttttgttgaggatatttgcatctctgttcatcaaggatattttatttgcctggagtattcttttttattgtgtctctaccatgttttgatatcagaatgattctggcctcatagaatgagttagggaggagttcttccttctcaatttttggagaatttcagtaggaatggtaccagctcttctttcacatctggtagaatttggctgtgaatcctcctggtcctgggctttgtatctttggcatgctttttattactgactcaatttcagaacttgttattgatgtgctcagggtttcattttcttcctgcttcaatcttgggaggttgtatgtttctaggaatttgttcatttcttgtaggttttctgatttgtgtgcatagaggtgttcataatactctctgaaggtttttaaaattttctatggggtcagtggtaatgtccactttgtcatttctgattgtgtatttggatcttccctcttttttattagtctacctaacagtctctcgatcttattctttattctttcaaataacagacttccagttttgttcatcttttgtatgattttttgcttctcaattttattcagtctagctctgattttgattatttcttgtcttctgctacctatggggttggtttgcttttgttttttttttttttttagttcctctaggtgtcatgttaggttgttaatttgagatatttaaaacttttttatgtgggtggtgtttaatgctagaaacgttcctattagcactgctttagctgtatcccagagactctggtatgttgtacgtttgtttacattaatttcaaagaatttcttgatatttgccttaatttcattatttatccagaagtcattcaggagcaggttgcttaatttccatgtaattgtatcacttttgagtggtcttcttagtattgaggtctatttttattgcactatggtctgataatgcggttggtataatttcttttgtaaaaaaataaattttgctgagaattattttgtggccaagtgtgtgttcaattttagagtaggtgccatgtgcagatgagaagaatgtacattctgttgtttttgggtggagagttctgtagatgtctgttaggtccatttggtcaagtgttgactttaggtctcaagtatctttcttagttttggctatggaatcttttctggcctctgtggacagtagtcttgctcgggcccactaggttcattttatccactcaggctggcaggctgtgctcagctcacgccaccagcctggatgccacatctccaagggagactgcaagtcaggcacagagcgaggggtgtgtgagtgagcatggagtcctgccactgtgcagtcggacatgttggctgctgctgcagggtaggcagctccaggtgctggcatgggcaccagctctctatgaggctgtggctggatcaagagcattgcaagcagcttccccggctggtactggggaagttcttgtcctgtgaccaggaagaatgaagtatgcagacaagtagagggtgaacaagatgaagaagagctttattgagagatagaacagctcagaggagacccacagtgagtactgggtagttcctttccacaaccaggtgtcccaacaagtgttcagctcctagcaaagaggagaccctggagtgggaagctcctccctgtaggcagatcattccattgtctctgcagctctcagcagagaggaggccctagagtgggtggctcctctctgcaggcaggtcatcttgttgtctatcccatcatctttccatcttctcctcaagtctgactgagcctggggtttttatggatctcagaggggagaaagtacatgctgggtggtccatgggtggccatgagtgggcccagggtaaagcaccacaagctccccctctggtctgtgggacaggcagcctggtccccaggcttcaggccctccccagcttgaaggtagggcttcactgaggacccacccccttccatctagaagcctgtctgcctcctgctgctgttcatggcgcctagaatattcatgcccagggacacctgcaggccagtctgggctgttctcagcaatcccttggcctccctcccatgcttgttggtgcacaaagtctggaggggattgaagtagcagggggctggcatgtcagtgctgccccaagtgtgtgcacaccctgccaggctgtgacagtgcttgtgcttggtctgaactctgctccatgatcagagaggatgggacagtgggaagaggcccagcgtgggaataatacctctgagcctgtggcagtaaggggggctttcccaggacccccaggagtgcagagatgcctgggtctgcagctgcacctggggcagccacagctgtgctcatggagctcccaccccaccaacttagaaggggtggggatcccacttatccctgctcccaatgcctccatggactgtgctgccctggctgcaccccctcgcagcctggtgtggggactccaggtctttgttgggcctgggctggtgtctggggcaggggtgacatcaccatgagctcccccatggccctggtgctcaggggaggcacagggctccccatcacctggcttgtggccctgcccagggggcacatctgggagtggattgtgggctctgggcctggctgtcaggagtgtcaggctctgcggtcaccccgatatgaggcagaccccagggacgtggcccagggcagccccccacaaagccacctcctgaggcacaggaaccttcccacttcctgtcccaggcccctgaggcatggccccagcttcatgccccaggctcagcccccgcactccatgtgcaagcagaggactgcccttggcccatctctgcttcagagtccctctctgcctgaccacactgctcccctattggcaggcaacttggcccagccccatttcagtggcccccagggtggcaggttgtagggggttcgcaggggtgggctccagggccgtctgcctccttcccacactctccctgcagtggcagtgggcgagagcagaaatgcagggccagggcccagagcaacagaggctctgggactggaagtggattccaccccgcagtgagagaatggggccacacagttggccgtcttggttatgcagggcacaggggacccactgccaccactgccacgcctgcagccattcctgctgctactgctcacacctccccactgcagccagcatgatggcagcagctgccccagatggcctgccactgccctcattttatgcctcagttatctgtctaatatggccagtggggtgttgaagtctcccactattattatgtggctatctaagtttctttgcaggcctctcgagatttgctttatgaatgtggccactcgtatgttgggttcatatatatttaggatagctaagtcttcttattgaatcaaaccctttaaaattatgtaattcccttcttttccttttttttttaaatcattcttagtttaaattctttttgtctaaaattagaagagcaacctctgtttttaatttgtttgtttgtttgctaggtagatttttctccatccctttaatttttacctatgggtgtcattatatgtgagatggatctcttgaagacagcatacagttgggtctcgctttttaatccaacttgcccctctgtctttcaattggatgtatttagcccttttactcaaggttaatatcgatatgcacaaatttgattctgtcattgtgttgttagctggttattatgaagacttggttgtgtagttgctttatactgtcaatagtctacgtacttaagtgtgttttcatggtggccagtaatggcctttcatttccatatttagcactcccttaaggacttcttgtaaggcacgtctgatggtaacaaattcccttaaaatctgcttgtttgagagggattttatttctcctttacttaggaaatatagtttgggtagatatgaaattcgtggttggaatgtcttttctttaagattgctgaatataggaccccagtctcttctggcttgtagagtttctactgaaaggtctgctgttagcctgattgggttccctttgtagttaacctgccttcttctctttagctgtctttcatattttttctttcatgtcaactttggagaatctgatgactgtgtgttttggggatggtcatcttgtatagtatctcacaggtgttctctgcatttcctgaatttgaatgttggctgctttagtgagcttgaggtaattttcttcaacaatatcctcaaatatgttttccaagttgctttctattcctctctttcagagatgtcaatgagtcctctatttggtccctttacctaatcccatatttctcagaggttttgttcattcttttaaattcttttgtctttacttttttcccagttgagttaattcagagacccagactttgagctcggagagtctttcctcagcttggtcttttctgttcttagtacttgcaattgtattatgaaattcttgtagtgagtttttcagttctgtaaagtcagtttggttctctctaaaaatggccattttctctttctgctcttgtatcattttattgtattccttagattccttggattgggtttcaactttattctgaatctcaatgatcttctttcctatccatgttctgaattccatatttgttatttcatccatttcagcctggttaagagctattcctggggaactagtgtggtagtttgtaggtaagaagacactggctttttcagttgctagagttcttgcactggttctttctcctctctgtgtgttgatgttccttcaatctttgaagttgctgtcctttgaatggggttttgcttttatcttctttggtgccttgggggtttgattgtggcaacaggtggattcagttgtctggcttcatttctggaagacttcaggggccaaatctcagtttagcactcctgagctgtatgctctaactctgggggcctggtgctaggccctgttttgttctctggccccttgcagtagtggggtagtggcaccatgtatgcgttcacactggcagcagtggaacagtgacattcttgcatgtgctcacactgatggtggtggcagcagtgttgcaatgggagtatagtgccagtggggacagggcaatggcatctgtgctcacactcatgctggtggcaacagtgtggtgggatgtctgaatgttggcaggagtatggcactggcagaggcagggtggtggggggagtagggtgtgtgttcacatgagcacaagcaggggaagggaggtgaggtccacacattcatgtatgccagtaaagcagttggggtgtgaggtgtgagtgagtgaatgccagcaaactgacatggggaggctgcagtgcaggaaggctgtgggtggctggtacacattagcacaggctggccagcaggagctacctaacagttaggcggggtcttctgatgaaggagctatgatgagggctcctggaaagcaccctgcttgggcatctgaggctacggtgcaagcaggcatggccaggctgggctgggaccctaggaaaggctggcacacaggggagcactcagatcagactggcactggcaagaccactgttctctgcccaggtccaagagtcacccaaaggctaaagtctcctagaggaacatggtgagccttaggggatggacattcctggccatgctccactgcagctgtttccatgtcaaaccctctgatctctgcacagcctgaagtcttgtctctgccacccctctaagcagctctccctgctggctgaagtgtctgcggggttcatggggtctcctacggctaggattccagaggtctgtggcaagagtcagctaccccttgcctgttcaactcaccccttcccaaggagttgctgggagccaggaattagtcccagcactcagcagcactgtgcagtgtttccagctttctccctcttcaacccagtgtctacatcctccctccatcaactctcaatgccttccctccaaagatctgcttggagtatacctgtcttccagactggcagtctctcattggtagatgctcctcctggctgtgtccagttggccatcttggcttctggccaaggactttgaaaacaaggatgtctaaaactttcattttaacttttgtttctctgtaatacaaatgctttccagccaggcacaaaggctcacacctgtaatcccagcactttgggaggctgatgcaggataatcactcgaggccaggagtttgaggttacaatgaactataattatgacactgtactccagccggggtgacaaagtgagaccttgtctctaaaaataaataaataaataaatgctttctatcatcccaattttcaaaaagtctactaagggtacaagatgttggcatgaaagattctggtgaaaatcaaaaacctcatcatctatattggtaccaaacaaaagaaaaagtaccagccaggggaatgaaatgaaaaagagaatttaggtttatcagaaagagaaatttgtatataggaataatcatggagcacatatatccctgggaatttgcagaaagttgggtttgggcattacatttgggctgatttcaataagtgggaacatgcatgtgttgtgagcgtgtgattatgtatgtgtgtgttcaccttcccagtatgggtcctcgaggataaggtaaggactaatgtttcctatgcttacagtactctcagacatgtgccctctccatggctgataggtccaaacgcacaaacagaatttgccatacactccatactcctaagcctcattccctgatatgctctcccataccagaatcaccataccccacacaatgtccttttttcagctttattggggtataactgataaataaaaatcctataatttcaaggtatatgttttgatatacattgtgaaataccttccacaatcgaatgaattaacatgtcagtcacctcacagttacctttttttgtaggtatagtaagaacaaatttcaagtatgcaatacattattaatatggttaggctttgtgtctccacccaaatcttatcttgaattataatccccataatccacacgtgtcgagagagagagaccaggtggaggtgattggatcatgggggcggtttcccccatgctgtcctcatgatagtgagggagttctcaggagatctgatggttttgtaagtgtttggtagttcctttcgcgttaatttttccttcctgccaccttgtgaaaaaggtgccttgcttcccctttgccgtctgccatgattgtaagtttcctgatgcctcctccatcatgctgaactgtgagtccattaaacctctttcctttataaattacccaatttcatgcagttccttatagcagtgtgagaacggactaatataattaactacagtcaccatgctgtgcagtagatctccagaactttttcattttataactgcaagtctgtaccccctgcccaacatctcccatttcaggaaggaccacagttattctcagttattttttttatctaccactcttccccaccaagactgtgggtacagacaacatagaccctggggagtttcatcttgggtcccccgagcacagagcatggtgccttgttcttaggaagtgcttaataaatatttggtgaatgactaactcaagatctccccttcttggtaggtttaatcatctggttcttacaaaatgtcagatgtggatgccttgactagttagctccctttagcatagagattctcaaacctgtctttatgctggaatcatctgagggttttaacaattattgaaatctggatttcacccacttcatcctcatttaagtggttttgctgcagcttgggtgtggggaccttggaagcctcctcagctggtgctgatgtgcagctgtgttgagaagcctggtctagagttcagtgtcttgcttgggctcattttcttcttttcattctcactactgattgttgctggcttttctttttttcaaggccagtcttgcagagctgtctacaaataaaatcatagatgtgaaagcactttaaggaagttaaaagtgtgttggaactatctgattaatataggaatatctcctgaattggatttggctttctaagccctaagtgaggtcatttaactttcttcctcagtagaaactagtaaggaactaataaaggacaacagtggagcgttatggtttcttgggagtaatgtgcttttgttcctcctcccaatagctacctaggcggcaggagtgggatgtgagaaaagaaggatggagacattcaactatgactctgtgctgactttttctccactgatttccttggaattaaaaaaacagtcaccctccctcaccaatcccccacctccattccatacgtgtggcaaaaggtcaagcagctctgagatcatgggcaaagagcagacatcagggcccttctcacaggcccatctcaaagctgctccctctcgagatggtgccctgggagctcttctttactcagtgtcagttaagtcatgatgcagaaaacctcagaagcttagaggactgggtgtccactgctccctggagacactctactattttctctgttctcttagcacttgccatgacagatggctcttccctagaagtaccacaggccatcctcttcgggtcactttctaacctctcaacctatggttaacattttaaattaacatccttttggtctttcttctttggtggatatgacttcacaaacacacacacatgtagactgatatggtttggctgtgtcctcacccaaatctcatcttgaattatagctcccataatccccacatgtcgtgagagggacccagtgggaggtaactgaatcatgagggtgggtttcttctgtgctgttctcgtgatagtgaataagtctcatgagatttgatggttttattaagagcagttcccctgcacacattctcttgcttgcacacattctcttgcttgctgccatgtaagatatgcctttgcttctccttttccttcctccatgactgtgagtcttccctagccatgtggaactctgagtccatcaaacctctttttctttataaattattcagtctcaagtatatctttattagcagtgtgagaacagactaatacatagacacatacacactaatacatacatgaacagaagtgtacatatacatttttaaaagagcttgtcacccaggctggaatgcagtgacatagtcatggctcactgcagcctcaaattcctagactcaggtagtcctcccacctctgcctcctgagtagctgggactgcaggcacgtgccaccatgcccagctaatttttgtatttatctattttttgtagagacagggtttcaccatgttgcctaggctggtctcaaactcttgggttcaagtgttctatctgctttagcctcccaaagtgttgggattacaggcaatattcttataaataaaaaagatatctccttataagccttatgcacaaccatctgtaccccaaatggtgttttcacagcattcatgaactcatagtggagttactaccaagaattgtgagatccctggaatgctcaggattttcccaaaaggaccaaagaatcaggaaatggtgccaatgttccatctctgcatgactaggtgactgagaaaatcatgttacttttctgaacctcggtttacttgtctgccatgcaggcttaataatactcatattatctaatacagagttgtagtggggatcaactgcataatgcaggaaaaagtgcttagggtgccaagaatacacaatgaagaaagaatagtcttgttaataaaaggtgttgaaagaactggctatcaacatgcaaaagaatgagattagacccctatcttacaccatacacaaaaatgaactcaaaatagattcaaaattttaatgtaagatctgaaactatgaaactatgggaagaaaacatcaaggaaagcttcatgacattggtcttggcaataatttcttggacatggcatcaaaaggacaggtagcaaaaacaaaaatagacaagtgggactacatcaaactaaaaagtttttaacacagcaaaggaaacaatcaacagcataaaaaggcaacctatggaatggcagaaaatgtttgcaaaacatatatctgataatgggttaatatctaaaatatataaggaactcctataactcaaaggcaaaaaaaaaccctgagtaatctgggtaagaagcgggcaaaggacctgaatagacatttctccaaagaaggcatacaaatagccaacagttataagaaaagtgctccatcaacatcactcagaatcagggaaatgcaaatcaaaaccagtgagatatcacatttgctgtaatagccattatcaaaaaaataaaagacagcaaatgttggtgagactgcagagaaattgaaacctttgtaccctattggtgggaaaggaaaatggtgcagctgctgtggaaaacaggagggaggtttcacaaacattaagaatggaacaaccatatgatccagcaacccttcttatgggtatatatccacaataactgcagtcagaatctcaaagagctctacacttctatgttcatagcagcattattcccaatatataagatacggaaacaatccaaatgtccattgggtatatgcattcaatagaatattattcagccttaaaaaggatatcctaccatttggaatagcatggatggacctggaagacattatgccaagtgaaataagtcagtcaaagaaggacaaatgtccgatctcacttatataaggtgtctaaaatagtcaaattacagaagcagtaaacagaatggtggttgctagggaataggaggagagggaaatgaggagttattcaatgagtatatattgttcatatcagttacacatgatgaataagctcaagaggtcttctacacaactagtgcctatagttaatacagtactgttcacttaaaaatttaagagggtagatctcatgttaaatgttcttaccacaaaaatacccctctaccccccacaacacagaaggacacaaggaaactgttggaggtgatgtgtatatttattactgttgtgctgaaaccctgtcaactccagtggggatggtacaaggctgaagagcccaaagaagagacccagggactgcaaacaagacatggagtttttctggggacttatatccaggagaaagagttcagtggtggcaggctggacaggataactgcatagtccagttgtggcggggtaggcagcaaaaggcatgcagtttatacagcattttaacttaataccattcccctaacaacctccacctggcaaccttcacgtaactcaaaacaaagggccttgatcccccatatggactgcattccgtgggattggtcgggggctcagtttttcctcatagataaggaataactctccaagttggcctctcctggattccttagctcggaactcaaaactatattcaggtgtgtctgcgatacagggttgtcctcaaggcatgcttaagttattgctggcaggtgcgtttgtcataaattactttgattatggtgatggtattacaggtgtttgcatatgtccaaactcataaaattgtatatattaaatatgtgcagtttttatacatcaattatacctcaataaaactgtttttttaaaagtgcctcattcaaagcatcctggacacagacagtgatgcatccatttgtcctcagacccctcttaccatttccaggtgcccatgtgttggcatgtgtgtgctttgctcctgaaggtcagtagctcttgctttcttgcaaagaccactcttgtgttactggggctgttttacctgaggcttcaagaatcagagtcccttgaagtgtgtatccctttagggtaaccttagccaatgactaaggatgagaatatatgaaagtgcagcccctttttccagagctgggacatcctctagatgtaattgacattccagtgtccctgtgaagaccaaacctgagactttgcctaaaatcctgtgctggtttggcttcttctccttccagaccctacttccccaatacctcacaggctcctctgaggagcactttataatttagttactggtacacaaatcttttctcagtctgctccagggaagctgacttaagtcataaatataacatgatatgatggtgtaattcctgctggcaacttggcgatgacaaaaatatatacttattgagcaccttcttagacactgttcagtgctttttatttgaaacatggatcatctcatttagtcctcaatccatccttgtagataaagaaatgggggtttaggcagagtaagtaacttttccaagattacatggtagtttagtagcaaagaataagcttaactgaacccaaaactcctgttttggttttttcaatcaaactgaaggttttggggactgtatttttccctacctttttgtttggtttttctactttttctttttcatttttctcctcacctccctttcaatcatcttagcccaaagacaggtttacgaagagaagcatgttttcctgacaggcagatcggaaacaaaaactgctcacagcttggcaagaacaaggatagtgattgatcttaggctgctgctccaaatggcaaccactttaaaaccaatcctgcctctatcctgagtggagaaagcatcattcaccacatttcctatcctccctgagccactgcttgaagcttgcagctcaggtgtgagaagtgaagtgagctgtcaaaacaaggtctcattgctaggtgaggggttaggagaggaggaggctcaggcaatatttctgcagggagacagattgatttgaagatcatttttagtgactgctggtcactttattatttaattccacgtagagtattaagcatctgcttagatggcagatgtagaacagaaacatgggtaaggactggttttcgtcctggaggaatttgcaatctatggatgagacagatacattcagctaaccagagcccaagaataagaactggaatcctagattgagaacaacaagttctgccttggaggtctccagatctgccttggagagtcatagaaggcttcagatttccagcagcattttaggtgaagtaaataaaagatggttgcagtttcttcaaacagagtgtagtggggggtgtgggggtgtgggttgaaggtatttcaggtgaaaggaagagaatcaggaatggcactgaggtcatgggatgcagagcatattctaggaatggtccagggtatttggagttgctgaaaccaacagtgaggaaaggcacagtcataatttactcaaattttattacatgcctacgacatatcatgtagggtgctaatcactgtaaaagaaaagaaagatgagaacaatgcagactgttttcctttggttgctcacaggtgggggagacagacaagctaaaagatagctacagcaaaatgaaatgtgttatgagtgggtgcaagaaagtagattgaatagaaccagggagatttcctggaggaggggacacttgagataagccttacggttgaaggagccatgagattgaaagggtgggctatggactgattgctgagtgctttatgtcaaactagggagtttggagataatctgctagtgaagattggaatcaatacatatttaggtgcagtggaggcctgctgtcagacttgtgtttcagaaagatcatatgaatggctaaatatgtgtgggtcctcaggtctcctgacccttgtactgactgattaatgtggctgtgccctccgttatgagacatcagtcccattgtcctagctaattaatagatttacttttatctctgcaaattggtggcttaagattctaatacaaccgggggctgaggcggcgttgtgagtggagcagaaagaggtttcacctcacctgctcagctgcatcctctcgttcagtgtcctgtaacaggcaaggaaatggatggagactcagagtgctgatttggtaactgtggtaatgggcaggctcttgtcatttatgaggagttggaatggattagtcgtaccttttaaaatgcttacttgtgaaggggtgactaaacacgtcttgattgtttgcctctgacaagcctgtttccaagcctggagagacaggattttagaaggctgagtttcaaaggcatacccggccttcacaaatagagaaaggagacttgagggacactcaagcctggcctgagcatttccaactaatgctgggcagctgcccctaagccctccccaagtaacccacaaagcaacagctttgctttgaaactaagactctgcaccaaatatccatctatttataacagcaacaaaaactgccgcccctttgtttcacatccttctaccagtcctacctttggaatctcttttgaactcccagaataattcatttctccctcttttctttagtatcatgaggatatttggcttctattgaaacttcttagaaaatgaatttagacagacttagatttcaatttaatcttggcagcttgcatcttgctgtgtgaccttcaaaaaatcacttagcttctctaagcctattttctgatttgtaggacagagatgacagtgcctatttcaaaaaggatatgacaagagtttgtcaaagtcctcagtcttatccatggcatagagtgaatattcaataagcggtgtttctttagctttccatcctcatcccattctcccaagtctgttggctctgtgaagacagactctgagtctgtcacatgtttgcttccagttcaaggtttagtgagtgcataaggaaaatgagctacagaaatgagtctggatcgaaaaattctgtttaaccagtctatgcgttctacttaatttatacattacttagtcagttagactgctgagttgattgaggtcaacatctcaagttagagagtagcactgttgctggtcctgacttcactgggaccctacaatgggaattcaattcagagatgaatgcaaccctgcaagcaagtctccacttccaaaagagcaggcccaagcatctggcttatgggcggacagaattgcagttctgcaaaaataatggatcattggaatgtggtggcaagaagagaactctcagaacacccccaaaaggttactcagtccaatatcttgaaattttggggcagactcagactctctttatatcctcaagcccttcatttccaccttgtaatcctcctctatttacctggaacatgatttgcttctctctgctaagtcagtcctctttatccttctaagtcccacgctagttatacccttcccatgacgtttcctctgactctgtgggtccctccatttcagaggaggaaaagccttcacggtttgtatgattgccatctgagaattaacttcactttaaaaaataacctatcttatttttttagagacagagtgtctgtcaccaggctggggtgtagaggcaagatcatagctcgctgcagccttgaactcctgggctcaagtgaccctcctgtctcaacccctcaagtagctaagactacaggaatgtgctaccatgctagctaattaaaaaaaaaattgtagagatgggatatcactttgttatccaggctggtctcaaacatctggcctcagttgaccctcccacctcagcctcccaaagtgctgtgaatataggcatgaaccattgtgcctggcccaaaataacatttttttaaaaaaaaattatatttctaaattataatgcaaaggtgccacagtgttaaaaataaaaaatttaagaatagaaaaaccaatcacctcaatctatatgttttaacacaactgtagttgacattgtgatgtatttacttcctgtgttttaatattacaagcatttttagcttatgaataagaattatataagaatgcatctacaacagtctgatttttacatcaaaatgttagctttttttatattacaacataatgttcacaacaattgcttttcatgaatggattacattatgaataattcatactctttactaaaattctctttggtagtttgtctttaccaaatggtagttgatgcttttttattacagattgagcatccctaattcaaaagtccagaatttgcaatgcttcaaaatctgaaacatttttagtgctgacacgatgtcacaagtgtaaaattccacacctgacctcatgtgatgggttgcagtcaaaacacaatcaaaatttattctatgcactgaattatttaaaatattataaaaaattaccttcagactctgtgtgtaaggtttatatgaaacataaatgaatttcatatttagacttgggtctcattcccaggctatctcgttatgtatatgccaattttcccaaatctgaaaagaaccaatatgcaaacacttctgctcccaagcattttggataaggaatattcaacctgtattataaataatgctgctatctatatcttttgctaatacaatcatatgggttagtatagactaacatttcaatgtattaaaaaaatacaagtctttttctatttgtcactcacatcacagcccagggtcatcatttttgctcccctccactcagctccacacattagttagggatcaggcttctttcatctggtggctgtgccatcttctaggatttcaaaggtttcggatggtcctcaaaattcaggagacagataaaggaaaaaacaaagcatgaagaatttcaaaggaggctttaggagtctgcttggaagggatatgcaagatttatgcacacacaccattggccagaatgcagtcacatgacttcacctagctgcaagggatgctaggagaggcagtcctgctatgtacctggagagaagagaaaatggtcttggtgagcatttagaactatctctgcaattgttttctttattttatattacttgtttaggcttgatttccagaggagttattttacctcaaaatttaataatttttatagctagtaatgtttattacatcatcatctctacatccgttcatttattcaacaagtctttgagtgcctgctatgatatagctactgtgctggataggccctacggtgtaacatagaacaagacatatagttagatttctagcaaggaaaacaggcaattagccaagccatctactgtatactctcttgttttgctcttaaatgtttctttgtgtataaatctccatgaaagttttatattccttgaaagccatatatttcttttatgctttcagtagtatctggctcaatgctgggcacacataatctaaaatgttatagattctgtaaatgatgtgatcagtcatcaaatattctttatgaacaatgctctgagaagttaaatgactggctaaacatctacagtgcaatcttaaaacacaatagccaaagaaaagtgtccaagtgaattggatgagacgtcaaataatctttctcctaggaaaggaaaaaatgcttttgatcatgaggaggattctcccacctccactgtgtgcctgaaataagcaaacacaaacattgcagtaactcacagcaggagggacttagagcaaatgcagagcttcctgtcatgatggtttgcattaaagtcaagggagatggtaaactttctagccaaggcgatgctaagaacaaagccaatttcctgttagtctgaggtgacttagaaaaagttcacctcccaggagagggcgaatcttttgctttaccttcatttctaaagtataactttcatttttaggcacaatgctgcttcctttatgttactttgctttttttttttctcaataaagcattaaaagagagtctgctccctgcagggaattatggtttctccctcaattctcatatttctcaacacctgttgggcagctgctacatcctgcccaagcagtggctgcatttgcaaggactaaattctaacaatatggaaagttagtgatatacttaagggatttgcaatatgaacttaactatagtagattgctggaaccacactctcatatttcccatgtacttctgtggtctccattaagaagcaataaaaataacagagctactgagttcactggctacgtagctatgactctttttctacatctgagtataaccacataaatgcaatatttttattaatacaatagctctatatctggctgtgtatatctgctaaatataataacagtttcttaattgcattacagtcacactaatgcttagcatttactaggaatcaggcattggtctaagcatgttacatatatcaatacatttaaacttcaaacagcctttagaggtagctattattataatccctattttatagatggggaaaataaaccccagaaacattaagcagcttgctccaggtcacatagctggtaattgcagagccagaatttccaactggacaatctggatccatagtctatgatcttaactggtatacaatacttgcatttagtagttgatgttagatttagaaaactacacctcatagtacaaagtgaggaatattattatatttcaaacttgcaacaaaccattgagataagtaggacaaatactaccatagttattgttaatattactatttctcccataataaaagtgagacacaaagtaattaagtaacttttaaaagctcatatagttggtaagtgagagagcaagaaaattctgcatcctggttttatatatatatatatatatatatgcactgtatattatatatgtaatactgtgtacattgtctgatgtgtacagcacttggatatttataaaaatatataattttacatcatatatagatatataataattaacataatttgggaatggcatttgaagacaaatgcattaagttgaaatacaacagcactatccagttctttttaatatacatttacttctgaatcttttacagattgaaatgccctatcctaggaagaaaggtaagggatgttttatggtctaaaagaattaagttccgtatttcttgtgaaaacaaaattcattgcttagtgacaaaaaggttacaggtttcttataatagttcaataagccaggttattaaaatttcagagccattcaacattccatgaatactttttgtatctgtggaggtctgaaataaatgagatgaaagatctcttgagccagagttctggtctcaattctgctagagattggtctctggtaaccaggaactagttctgtagcctctctgggcttcaagttacttatttttaaaatgaacttagggatataattagtaaatatttaaaggtccttggaattctggccaacagttactcgaagttacttaaagcagtgaaggtgacaagaagggcaatttttgtgaactgtgacattgaacctgttggaatccaacattcagtcacactccagcagaatcgggtgaaaaggaagtgtttcacttggccatctctctctgtatttggggattcattctttccttcatgaaataattactgagcaccaaatatgtgtcaggcactgttgtagatattggggagagagctaggaaccaatataaaagtccctgctctgatgaagcttgcattgggtttgaggaagccagaccttaagcaaatgaacaagacagtacatgtcaagagttagtaagtgctatgtaagaaaataaagcaggataggggtggagaggaaaagtttagaagtggattttatttctcatttgatagtaaacgtcacttgaattgacatgaggcaatttctcagtattgttcatctaatttggtgtgcttgttgcagaaacatccatgtatttgaatattggatgctgccccagacctagatgggggtgttctgtgatataaatttataaaatctgaaaaaaattcattttaaagtgcatctgcatggtatgttttcagataagagattggggagctctaccagccagacttcaggaaagaggtcaggactaggaatataaacgtgaaagttatgattgtatagattgcgttttaataaagctgagtggctggataataatatctaggggttgaatatatgtgacaaaaaaaaaagaggaacaaggactagaccatggcctactccactgttttgagtgataagatggacataaaaaaggagactgagaagaggtaaccagagaggtaggagaaaaacaaagattgctgtccagaaagcaaatgtagtgtttcaagagcatgacaggaaggagagatcgcctgtgtggaatgcagcttacaggtctagaaaaatgagaattgaacatgtgaaagaaaagcagcagcagcagcagcaacaacaatatcaagaatcctttctcagaagtcctagccagaacaatcagacaagacaaagaaataaaaggcatccaaacaggaaaagaagtcaaactatcttgactgactatatgattctacacctaaagactctatcaaaaggctcccggaacagataaacaacttcagtaaagttttatattaaaaaaaaatgtacaaaaatcagtagcatttatatacaataacaatatgcaagctgagagccagattaagaacacaatcccatttacaatagccataaaaaattaaaatacctaggaatacatctaaccaagaaagagaaagatctctacatggagaactataaaacactgtagaaggaaatcagagatggcacaaacagatgggaaaacattccatgctcatggatgggaagaatcggtatctttaaaaaagccatactgcccaaaacaatctacagattcaatgctattcctatctaactaccagcattatatttcacagaattaggaaaaactattctaaaattcatatagaaccaagaaagagcccaaatatccaaagcaattctaagccaaaagaaaaaagttgaaggcatcacataacccaacttgaaactacactctaaggctatgataaccaaagcagcatggtactagtacaaaagcagacatgtagaccaatagaacagaatagagaatccagaaataaattcacacaacaccagccatctgccacacaatgccagccatctgatctttggcaaagttgacaaaaataagcaatggggaaagactccatattcaataaatggtgctgggatagctggctaaccatatgcagaagaatgaaactcctacttttcaccacatacaaaattaactcaagatggattaaagatttaaatgtaagacttgaagttttaagaatcctaggaaaaaacctaggaaacaccattctggatacaggccttgggaaagagtttatgactaagtcctcaaaagcaattgcaacaaaaacaaaaattgacaagtgggacctaattaaactaaagaacttctgcacagcaaaggaaactaccaacaggttagacaatctacaaaatggaagaaaatatatgcatctgacaaagatctaatattcagaatctataaaaacttaaacaattcaacaagcaaagcattaaaaagtgggcaaaatacatgaacagacacttctcaaaagaggatatacaagtggctaagaaacatgaagaaatgctcagtgtcactaaccatcagagaagtgcaaatcaaaaccacaatgagatgccatctcatatcagtcagaatggctattattaaaaagtcaaaaagcaacagatgctggcaaggctacagagaaaatggaatgcttatacattgctggcggcactgtaaattagtttagccactgtggacagctatctggagatttctcagataacttagaactaccatttggcccagaaatcccattactggtatatatcaaaaataaaataaattgttctatcaaaaaagacacatgcactcaaatgttcactacagcactattcacaataggaaagatatggaatcaacctaggtgcctattaacacaagattggataaagaaaatgtagtatatatacactggaatattatgcaaccataaaaatgaaattatgccctttgcagcaacatggatgcagccgcaggccattatcctaagtgaattcatgcaggaacagaaaaccaaatactgcatgttctcacttaaaagtgggagctaaacatttagttaacatagacataaagatggcaacagtagacactggagattactaaaggaggagggaaggaggagaaaaggggttgaataactattggatactatgctcactacctgggtaatggggtcagtcataccccatacctcagcatcacatggtatgcccatataacaaacctgcatgtgtatctcctggatgtaaagtaaaagcagaaattatttttaaaaaggattataaaaagaaccctgtctctttttcattattatcaccaggatttatgaaactgatagccattcttaatacacatttgatctcatttctaaaatgattacttactagttgctactttgaggcacttaaactactttatatttcctggaggtgaggtgcatttcatgaagactatgtaatacagttaaaaaacataaacttcaagtccacaaagatctggatgcaaaatatacacctaattacgctgcccacagatcaataggtcaatctcagataagttacttaacattgctgcatctcagttgtctcatctgaagaatgaggctattaacaacaatctcaaatatatgatgaagattaaaagcaggtctggagcacataacaggtcctcaaagttcttccccttttctagggaaagtggacaacctacaaaagagaagtatggcagtaagaggaagcacatactgaatgaatccttaggagacatgggctagagttctggctgtggcagctacattttgtgaaaccccaggcaactcacatcacattcttaagccttggaatcagaggtcaataatctacaggcccaatctgccatgttgtgattgattagaaacatatttttaggtggttggttggttggttatataggtattgctctctagtttgccatagttgatccttttctcatgatatgaatcatttacattatcttcctgtcccttgaattgactcaattttgcagcccctggagtacaaaatccttctggtcccttcattgagaacattttacacattttgtaactagcactcctacatgtccttgttcagggtacctttaattattgaacgctatagacacaatgcttagagcctatgctgttttcaataccacaggaaatattttaggcctgaagataaaatgatggtctctgaaataagaaagacaaactgcaaaagtaaatgatagaagttgttatatacaaaacatataatggcataccagccactcaacagcaactcagttcaggtagtttgatatttaaaaaatgaagtttaaattgcaagaatacaattaataatttattatttttattttttttttgtagaaagagagtctcactatgttgcccaggctgattttgaattcctgggctcaagccatcctcctgccttagcctcccaagtgctgggattacagcagtaagccactgcacgtggccagtaatttatgccttaggcaacttggaattatagaaaattatcaaaatcttttcaaattttttagggcaaatattgcacttaatgctaatgtggaggcatagaatgttattctttaggaactgtagttactcttgtttttctgccattcttggggaatgtatcccataattttgagcttttgtcatctatttcctgcacccttttctctaagctatcaaagaagtgaggaagagaacggttatctatgcttccatattcacacatttgtcttattatagatcattctgtccttagaacttagcaaattgtaggtgctcagtgatgtttattggcataatcgtccgctgagggggaaggtaggaatgacaggtgttctgtgaaagggcggtatatacaaagtggccctcaaatgcagaaggagctgagaaatcaaagaagaaggcaaacaaatctagtttgtcatttttgggttatttattagaacttacagacagaagtgtggtcttggtggccacaagacagttagagatccacactgcaaccctcaggctcatggcttatatcttggggaaagcatacgtgctctggaaagaatatgtaggtggctatgtgtgtcaccacctatgatttctgcaatggcatcaagagttcttgtggaggaaacttagagtgaataagtgtttctacataaagaataatacatcaactagacatttcagaggcactcccagactcagggttagtctgaagttacatggcagattagcatttaaaataaagtcattctcatccccacagcaggggtcaggtgcctggaagggatataatgtaaagttttggttggttcatcataggatatctaaactcctatattgtttggggaagcaatattcccagcatcccttgcctctaggaggggacatgtgacgtatttgctacagagaggcatatgtctgttcaggtttctagaaaagcttttacttttctgacttaatgggatagatgcagctagtattgcatgccctctttctacctgaaatccaggagtgatacctggaggagcaggtgatgttttggctatgttaagttgaaaatcctgcatgctgggaatggtggaatataggctgaagaacattcgatctttgatgtcatagataaacagctgcaccaactcagatcatctacttccatattgcttattacaagataaaattaaacctcataataagccatagaaagtcagggtttttgggttttgttttcattttgtacttgcagccaagatgatgtctgattgctataccataagaggggagttaaaaatggaggagagatgaagatcattggcacctttagaaactttgaagctaggacactgaaaggatgttctggaaggaaagtgactgtatgtatacagatttttttttaagcctttaagaaaataacaatggttatgctagcaggggatatgtataggtttttataccctaaagtataagacttaaatagatgatgaaacaaccaggtactcagtatagaatacctcagtccagatgcatagcttcctggtattcaagatgatacaggaatagagcttagaaaacagagaaattgatgcctagcatgctccttacttacattatttatctatgcacatcaattttcttaccaatcatttttggcaggagtatgaatggtagataattcaagctaaactccttggaatcatatgaaatgtatcttttctctggctacttcatgaaacatcccctactagactgagatacttaagggaacgaactagaagagaggaaagtgtttgtgacagtgggatagggtttggagatgactcaggcaaatgtcaggcaaggaaacatttaagctgcttcaaagtggtttttgaaaaaaaatgattaattttggataagcaatcaggtaaggaagtaatgtctgtcctgtggccatttataaataaacacatacccagagatttcaaaaagtatatctttaagatacattatttagcacttcttttccagtttcattctgttctttggcttagagaagcctccttttttagctgtgtgctgaaactcagttaattgggatgtggttctaatacactaaaaggtgtgcctttaattttcattcccgtcattgaattctgttcccccagtaaagatataataaccatcatggtacaggaaaattagttccctctgtgggcctgtttccacacttgaaacgagacagtggaccaggtgttcataaaggtgcctgcctgctctaacattcaatggtgttggaattctacaacatagattctcttacctttcagtcctgaggtgcagtggacaatgagatagctgatgaccactcattttccagacaagccaagttcatcctctgagagcaaatggcttgcatggctttcttaggcaaagaatagctcatcaacacattatggcaagcctagtatttgcgcttgctttctggagaatttcaaaacacaaataaagaccttttctttcaattattaagatcagaataactttacttagagtgaaaaaaaaaattggaattgccctaaaaactctatgtatggatcctgatttttcaaaagatctcaaattatctttctttttttataaattcctgacaaaaattatctcattcagaactatatagctctaatcaaatatccactgcatgccataatcgggggtaggccatttcagtacctactagacaataaacaactccagaatgtgtcttgtttttatgcatttgtatattttcagagcttggtacagagcatgacatgtagaagacacccacaaatgtttaatgtatttgtagcaataatttcatcctataaaactttaaataataatatgaggtaggtaactactactattattttcattgcatatctatgtaaattgaggctcaaagaagtaaaaaaccaaaaatctggtccatggtcacagaccagttactggcagagctttggtttgaatctaagcatcttaactccagagaaagtactctttatactaactgaattgtacgtttttagaaattactttttaagtttctaactggcaaacaataattgtatatatttatggaacactgtctgtcaaaaagatgtctgcatgcccatgttcattgcagcattattcacaatagctaagatatgcaattaactgggtatgcaatggatgaatggataaagaaactaggatatacacacaatgaaatacaccactaaaaacaaagaaagaaagaaaagaaaaaaataggatactattcagcttttacaaagaaggaattctgtcatttgcgacaatgtgggtaaacctggaggacaatatgctaagcgaaataaatcaggcacaaaaagacaaataccacatgatctcactcatgtggaatcaaaaaaagccaaactcataaaagcagagagcagaatgatggttaccaggggctgagaatgggggtgaaggggaatggaaagatgttggccaaagggtatgagtgtcaggtagacaggaggaatagattgtgccatcttattatgactctccacctattcgccttttcctttacactccaagctcttttttttatgagatggagttttgctcttgttacccaggctggagtgcagtggcacgatcttggctccccacaacctctgcctcctgggttcaagcgattctcctgcctcatcctcctgggtagctggggttacaggcacgtgccaccataccttactaattttgtatttttagtagagacagggtttctccatgttggtcaggctggtctcaaactcttgacctcaggtgatctgcccacctcggcctccccaagtgctgggattacaggcgtgagccaccgtgcctggcctccaagctgttacagaaggattttcagctagaatatggaaataaccggcttctgatagaattttttttttttttttgtagaaaaccaattttgcagcaaaagagatccttccttgagtttagcttggagtaatatgccccagtgccatcccacagagaacaggaaagaattaaaagactgacaaagaaatgatacacgggaaagtaggagtctgattaaatagaagttacaagggtaagagagtgggccctgagccactggacgaggtgccggggcagagacaggaaatgaaatctgcagcagctcagtgaagaagccgtttccccaaatccagagcccaggtagaatcttaggtctagaaaggtttttattatttcatttcaaactctatgggtgcttgattaacaatattatttagaatgtggtctgtgcttctcactttcatgataattataaagttcttgggtaacaaaatgagttatgccattaactagtttataatctgttataccaagcagtttttcatcaacattgcagtacctgcttgattttgtatttataataatattactaaaacttatctgaaactcagttttctgggatttggatgaagctgactggttcagctcatgactttactctgaaagttttctacatattgggaggttcttcccttcctctgtcaattattcactgagctcctcatgcccttaagactactaagtatcttcaaagtttcaactgaattatccttttcccaggaacacaaagaatttaggaattggtttgtttgcggttaaccattcatgccatgagctaaagaagttggattcaataaagtattatttattaagtggtatctatcatattaaggggttatatggggttttaaaaaatctttctcatgcagccacgcatgatggctcacgcctataatcccagcactttgggaggctgaggcaggtggatcacctgaggttgggagttcgagactagcctgaccaacatggagaatccccatctctactgaaaatacaaaattagctgggcatggtggtgcatgcctgtaatcccagctactcaggaggctgagacaggagcatcccttgaacccagaggggcagaggttgggacgagccaagattgcacccttgcactccaggctgggcaacaagaacgaaactctctctcaaacagacaaacaaaaagaataactggaactctcatacataccttgttggtaagatttgttaaattgtgctattattttggaaaaatatctggaagtttcatataaaaccaaacatatacctaaactatgatccagcaatttcaatccttggatttaccccaaataaataaaaacatatgaacacaaaaatacttgtacaaggaggtcgatagtggctatatacataatggccaatatcccaagtatatgagtaaataaattatgatatattcatacaaaggactactatttagaaacagaagggaagaaaaaacataggtaaatctttaaaacctcgaatgagaaagattcatgctgaaagtacataccctgtgattacattgcctgttctaacaggcaattttatctttgacacaaaagaaatcagaatggtggttgcctgtggaatgggagtggagattgaatgggaagaagcctgaagaatgatgctttatttatggagtgatgacaatgtatatgtcttgatgggcatatgggttatttgggtatacgcattggtcaaaatccaacaaatgtatgctgaatatttgtgtatttaaatgtacatcaaatgaaaaataataaatattgatctctaatcatataaatgctgcagtatttaggtgttgtagatgtctacaatttattttaaaatgcatcagaaaacaagttgaattgatggatgtagagagggatgtcatagaacaaaaggaggtggtgaatatgggtgttcgttgtaaaattctttaaactttattgaacgtttgaatttttaaaataattttcagaggaatcactattgcctctaaatctgggagtttattttctacttttctttatttgactattttataagcattcttatattggctccaacctgtgcaagttcatattttcattctcaccttagagtcaactctcagaaatgaaaaaagaaagtttcaagctaaatgcaaataaacaaaagaacttacagctataaatgacatcaaagattcatttaattagaaaataatagtactctcaccccaatcaagactattttggagactctgattttgtgctttcttgcttaccaggcaaagaaattggtgcaaaataattcagcttcaggaaagatctggcaagatggctgaataggaacagctccggtcgcagctcccagcgagaccaacacaggagggtgatttctgcatttccaactgaggtacccggttcatctcattaggactggtcaggcagtgggtacagcccacggagggtgagcagaagcaggttggggcatcacctcacccgaggagtgcaaggggctgggaacctacctcccccagccaagggaagccgtgagggactgtgctatctggcccagacgctacacttttcccatagtttttacaacccgcagaccaggagatcccctcgtgtgcccaccccaccagggccttgggtttcaagcacaaaactgagaggctgcttgggcagacaccaagctagatgcagtttttttttttttcataccccaatggcatctggaaccccagcgagacaggaccgctcactcccctggaaaaggtgccgaagccagggagccaagtgatctcactcagcaagtccctctcccacagagcccagcaagctaagaaccactggcttgaaattctcgctgccagcacagcagtctgaagtcaacctgggacaatcaagcttgatggggggaggggcatccatcattactgaggcttgagtaggtggttttcccctgacagtgttaaggaggctgggaagttcagactgggcggaactctccacagcaagacaaagccgctatggccagactgcctctctagattcctcctcacccggcagggcatctctgaaagaaaggcagcagtcccagtcaggggcttatagataaaactcccatctcctttggacagagcacctgggggaaggggcagctgtgggcgcagcctcagcagacttaaacattcctgactgctggctctgaagagagcagcagatttcccagcacagcgctcgagctctgctaagggacagactgcctactcaagtgggtccttgacccccgtgcctcctgaatgagagacacctttcagcaggggttgacagacacctcctacaggagagctctggctagcatcaggcaggtgctcctctgggacaaagcttctaggggaaggagcaggcagcagtcttttctgttctgcagcctctgctggtgctacccaggcaaacagggcctggagtggacctccagcaaactccagcagatctgcagaagaggggcctgactgttacaagaaaaactaacaaacagagtgcaataatggcaacatcaagaaaaaggaaccccacacaaaaaccccatccaaaggtcatcagcatcaaagatcaaagatagataaatccatgaagatgaggaaaaaccagtgcaaaaatgctgaaaattccaaaaatgagaatgcctcttctcctccaagtgattgtaatgtctctccagcaagagtgcagaactgggagaatgagatggacaaattgagaaaagtaggcttcagaaagtaggtaataacaaactcctctgagctaaaggaacatgttctaacccaatgcaaggaagttaagaaccttgataaaaggctataggaactgctaactagaataatcactttagagaagaacatgaatgaactgatggagctgaaaaacacagcacagaacttcatgaagcatataaaagtatcaatagctaagtcaatcaagcagaagaaaggacatcagagattgaagatcaacttaatgaaataaggtgtgaagacaagattatagaaaaaagaatcaaaaggactgaacaaagcatccaagaaatgagggactatgtgaaaagaccacacccacatttgattggtgtacctgaaagtgacagggaaaatggaaccaaactggaagacgcacttcgggatattatccaagagaacttccccaacctagcaagcaggccaacatgcaaattcaggaaatacggagaacaccactaagatactcctggagaagagcaaccccaagacacattgtcagattctccaaggttgaaatgaaggaaaaatgttaagggcagccagagagaaaggtcaggttacctacaaagggaagctcatcagactaacagtggatctctctgcagaaaccctacaagtaagaagagtatgggggccaatattcaacattcttaaagaaaagaattttcaacacagaatttcatatccaaccaaactaagcttcataagcaaaggagaaataaaatcccttacagagaagcaaatgctgagggattttatcaccaccaggatgaccttaccagagctcctgaaggaagcactaaatatggaaaggaaaaactggtaccagccaatgcaaaaacataccaaaatataaagaccaaagacactgtgaagaaaccacatcaaataatgtgcaaaataccagccagcatcaggatgatgggatcaaattcagatacaacaatattaaccttaaatgtaaacgggctaaatgccccagttaaaagacacagactggcaaattggataaaagtcaaacccatcactgtgctgtattcaggagacccatctcacatgcaaagacacacataggctcaaaataaaaggatggaggaatatttaccaaggagatggaaagcaaaaaaaaaaaaaagcaggggttgcaatcagtctctgataaaacagattttaaacaaagatcaaaaaagacaaagaagggcattacataatgataaatggatcaatgcaacaagaagagctaactatcctaaatatatataaatgcacccaatactggagcacccagattcataaaacaagttgttagagacctgcaaagagacttagactcccacacaataatagtgggagactttaacaccccactgtcaatattagacagataattgagacagaaaattaataaggacttgaaatcagctctggaccaagtggacctaatagacatctacagaactctccacccccaaattaacagaatatacattcttctcagcaccacatagcacttattctaaaatcaaccacataattggaagtaaaacactcctcagcaaatgcaaaagaatagaaatcataacagtctctcagaccacagtgcaatcaaattagaactcaggattaagaaactcactcaaaactgcacaactatatggaaactgaacaacctgctcctgaatgactactgggtaaataacaaaattaaggcagaaattaataatttctttgaaaacaacgagaacaaagagaaaatttaccagaatatctgggacacagctaaagcagtgataagaggaaaatttatagcactaaatgccaacatcagaaagtgggaaagatctagaattgacaccctaaaatcaaagtaaaaaacctagagaagcaggagcaaatgaattcaaaagctttcagaagacaaaaaataactaaaatcagagcagaactgagggagatagagaaatgaaaaacccttcaaataagcaatgaatccaggagctgattttttgaaaagattaacaaaatagaccactagccagactaataaggaagaaaagagagaaggatcaaatagacacaataaaaaacgttaaaggggatatcatcactgatcccacagaaatacaaactaccatcagagaataatctaaacacctctatgcaaataaactagaaaatctagaagaaatggatcaattctggtcacatacaccctcccaaaactaaatcaggaagaagtcaaatccatgaatagaccaataacaaattctgtaattgaggcactaatagcctaccaaccacaaaaaagccccggaccagacagattcacagccgaattctaccagaggtacaaagaggaggtggtactattcctcctgaaactattccaaacaatacaaaaagagggactcatccctaaatcattttatgagaccaacattattctgataccaaaacctggcagagacacaacaacaaaaaaatttctggccaatatccctgatgaatattgatgtgaagatcctcaataaaatactggctaactgaatccagcagcacaccaaaaagcttaacaaccacgatcaaatcgacttcatccctggtatgcaaggctggttcaacatatgcaaatcaataaacataatccatcacataaacagaaccaatgacaaaaaccatatgattatctcaataaatgcagaaaaggcctttgataaaattcaacaccccttcatcctaaaaactctcaataaaataggtatagataaaacacatctcaaaataataagagttatttatgacaaacccatagccaatatcatactgaatgggcaaaagttggaagcattccctttgaaaactggcacaagacaaggatgccctctctcaccactcctattcaacatagtattggaagttctggccagggcagtcaggtaagagaaaaaaataaaggaattcaaatagaaagagaggaagtcaaattttctctctttgcagatgacatgattgtatatttagaaaacccatcatctcagcccaaaaactccttaggctgataagcaacttcagaaaagtctcaggatacaaaatcaaggtgcaaaaatcacaagcattcctacacaccaataatagacgaacagagagccaaaccatgagtgaactcccatgcacaattgctacaaaaagaataaaataccaaggaatacatcttacaagagacatgaaggacctcttcaaggagaactacaaaccactgctcaaggaaataagagaggacacaaacaaatggaagaaaattccatgctcacagataggtagaatcaatactgtgaaaatagctataatgcccaaagtaatttatagattcaatgctattcccatcaagctaccactgagtttcttcacaaaatggaaaaaactactttaaatttcatatcggaccaaaaaagagcccgtatagccaagacaatcctaagcaaaaagaacaaagctgaaggcatcacaccaccttacttcaaagtatactacaaggctacagtagccaaaacagcatggtactggaccaaaacagatatatagaccaatggaacagagcagaggcctcagaaataacacacatcgacaaccatctgatcttcaacaaacctgacaaaaacaagcaatggggaaaggattccctatttaataaatggtgttgggaaaactggctagccatatgcagaaaacggaaaccggaccccttccttacaccttatacaaaaattaatcaagatggattaaagacttaaacttaaaaccttaaaccataaaaaccctagaagaaaacctaggcaataccattcagaacataggcatgggcaaagacttcatgactaaaataccaaaaacaattgcaacaaaagacaaaattgacaaatgggatctaattaaactaaagagcttctgcacagcaaaagaaactatcatcagaataaacaggcaacctacagaatgggagaaaatttttgcaagctacccatctaacaaaggtctaatatcctgaatctacaagaaacttaaacaaatttacaagaaaagaacaaccccatcaaaaagtgggcaaaggatatgaaaagacacttctcaaaagaagacatttatgtggccaataaacatgaaaaaaagctcatcattactggtcattagagaaatacaaatcaaaaccacaatgatcaaaaccaactcacaccagttagaatgatgatcattaaaaagtcaggaaacaacagatgctggagaggatgtggagaagtaggaatgcttttacaatgttggtgggagtgtaaattagttcacccattgtggaagacagtgtggccattcctcaaggatctagaaccagaaataccatttgacccaacaatcccattactgggtatatacccaaaggattataaatcattctactgtaaagacacgtatgtttaattgcagcactatttacagtagcaaagacctggaaccaacccaaatgaccataaatgatagacgggataaagaaaatgtggcacatatacaccatggaatactatgcagccataaaaaaaatgagttcatgtcctttgcagggacatggatgaagctggaaaccatcatcctcagcaaattaacacagcaacagaaaatcaaacactgcatgttctcactcacaattgtgagttgaacaatgagaacacatggacacagagaggggaacatcacacactggggtctcttgggggatggggggcaaggggagagagagcattaggacaaatacctaatgcatgtagggcttaaagcctagatgatgggttgatgggtgcagcaaaccaccatggcacatgtatacctatataataaaccttcagttctgcacatgtatcccagaacctaaagtaaaataataataataataataataataataataataataattcagctccaaacaccattagaacaccaaaataactgttgcaagaaaggtccacaaaaggatgctaaaatttataggcaaaatttgaaaagaaacaagatatttgcatagtctcaagtatctgccaccaaactattaatcacaaagagagaagtaggcaccaagtgataaaaacatattaaccaagagataagacatgtcaacactatgtaattcttgatatgacaaaatgaggtcatgtcatgtctcttgtcgtcttgacaaacctccaaaaacaaatgcatagctttcatataatcatgcaagactttaggtaagcccaaacctaaagttattctgcataataagtaatcaaacctcttcaaaattatcaaggtcagacaaggagagactgaggaaatgattggaggagacaaaggtgacctgacatttaaatgcaatgtggaatcctaaaccaaaacaaacattagtggacaaacttgtgaaatctggatacagtttttagtttagttaatagtattgtatcaatattaatttctaagtttccataattatactaatgtgagcggaagttgggtgaaaggtatatgggagctttttgtattattttgtaactattctgtaagcctaaaattacaaagtaaaaaataaaaaagaaaagcaactgcaaaacaacaaataataaaactaagtttggatattaaaggttaaagggagaaaatagagagaataaagataagaaagagaaagagaaggaagagaagcggaggaggaggaagaaggtaaccattcctatttctgagtggtcacaaagaaattgcttgtccaggtgttccatctctcagctcaaacagtcttcaagtcggcctgcccacatgaggtctgtccctgaagaccattataatgaaaaatcgtaaaattttacttaaaacgtgaaagaagatccccataaaataacattccatttaaataaacaacagggctgttgcgggtaacttcacaaattgatcaaactcatctaagtcaatatggagtactggaatggactctggagccagatcactcaggttcaaatctatttcagaatggcatatttctgtatctttagacaagttattaaactttctgtgcctctgtttcctcataagtataatggaaatattaataataatattgatattattttgttgggaagattaaattgggttaatacatataaattacttgcctagcatacaattaatgctaaattaatgttagtcaatatagttcatcaggggaattaatgcataagaatcgccatgccttgaaaaacgagaataattgaaaatgttgtctgccaatgcttaaaatgtgctatgaagctacagtaattaaaaggtgatattgaacagcagtagataattaaatcagagaaaccaaataggagtccagaaatagatgcattttatatatgcatatgaatatatatattcttatatgtattaagtgaagaaagaatagattattcaataaacgtatttggaacatgtagttgagcaaatacttaaactcttatttcacacttacacaaaacaaattataaatggcttaaaaatctttacttattccctttccctaaccacccatttccaatctaactggaaagctctgccacaaaaatatatccccaatccaaccacttattagccactccagtgtgcattttaccttactccgagctgcaataatctctattgcaaaagcctccaaactagctgtcttgcttctgttcttaccgtcacccaaacatatacaccctgtaacctgaaccaaaatatagagcactgtcaacatgctagaaagttcccctgtgtccctttccaaaataccaggaagattcgggcttctggaagaggaaattgctattttgaggtaagcatgtttggctttaatagatactgctggccgggcatggtggctcacgcctgtaatccccgcactttgggaggccaaggcgggtggattgcctgaggtcaggagtttgagaccagtctggccaacatggtgaaaccccatctctactaaaaatacaaaacaattagctggacatggtggcatgcacctctaatcccagctactcaggaggctgaggcagggtaattgcttgaaccatggaggtggaggttgtagtgagccgagattgcgccactgcactccagcctgggagtcaaagtgagactccatctcaaaaaaaaaaaaaaaaatagatacagctaatgagattttcaaaggccagatttacaaatttacattgccattagcattgcataagagtccaagttaatctacatttttactaacacttggtggtgtcaatgatattaaattataatcatcctggtgggtacatactgatatatagttgtggtcttaattcacatttccctgaagattactgttgcacaaaaccttttgatagactttcggtcactgggatatcctctattataaacgtttaggttctctagtaattttttatacatctttccaatgtcttaaaatgtgatttaatttctcaccaaactgatgcttttgtaaaaaaatatgatttaaaaataattttcatatgtttgttggccacataaatgtcttcttttcagaagtgtctgttcatatcctttgcccactttttgatggggttgtttttttcgtgtaaatttgtttaagtttcttgtagattctggatattagacctttgtcagatgggtagattgaaaatattttctcccattctgtaggttgcctgtttattctgataatagtttcttttgctgtgcagaagctctttagtttaattagatcccatttgtcaatactggcttttgttgcaattgtttttggtattttagtcatgaagtctttgcccatgcctatgtcctgaatggtattgcctaggttttcttctagggtttttatggttttaggtcttaagtttaagtctttaatccatcttgagttaatttttgtataatgtataaggaagggatcccgtttcagttttctgcatatagctagccagttttcccagcaccatttgttaaatagggaatcctttcctcattgcttgtttttgtcaggtttgtcaaagatcagatgcttgtagatgtgtggcattatttccaaggcctctcttctcttccattggtctatatatctgttttggtaccagtactgtgctgttttcattactgtagccttgtagcatagtttgaagtgaggtggtgtgatgcctccagcttcattctttttgtttaggattgtcttggctatataggctctttttgatgtcatatgaaatttaaagtagttttttctagttctgtggagaaagtcaatggtagcttgatgggaatagcattgtatctacaaattacattgggcagtgtggccattttcatgatattgattcttcctatccatgagcatgaattttttttccatttgtttgtgtcctcttttatttcgttgagtagtggtttgtagttcttcttgaagaggcccttcacatcccttgtaagttgtattcctttgtattttattctctttgtagcaattgtgaatgggagttcatcatgatttggctctctgcttgtctactgttgttgtataggaatgcttgtgatttttccagcttgattttgtatcctgagactttcctgaagttgcttatcagcttaaggagtttttgagcttaatcaatggggttttctaaatatacaatcatgtcatctgcaaacagagacaatttgacttcttcccttactgtttaaataccctttatttctttctcttgcctgattgccctggccagaacttccaatactatgttgaataggagtggtgagagggggcatccttgtcctgtgacagttttcaaagagagtgtttccagcttttgcccattcagtatgatattggctatgggtttgtcataaatagcttttattattttgtgatacagttcatcaatacctactttattgagagtttttaacatgcagggatgttgaattttgtcgaaggccttttctgcatctattgagataatcatatggtttttatcattggttctgtttatgtgatggattatgtttattgatttgtgtttgttgaaccagccttgcatatcagggatgaagccagcttgatcgtggtggataagctttttgatgtgctgctggattcagttagccagtgttttattgagaatttttgcattgatgttcatcagagatattggcctgaaattttctttttttgttgtgtccctgccagtttttggtatcaggatgatgctggcttcataaaacaagttagggagcagtcccgccttttcaactctttggaatagtttcagaagaaatagtaccagctcctctttatacctctggtagaattcggctgtgaatctgtctggtccggggctttttttggttggtaggctattaattactccctcaatttcagaacttgttattggtctattcagggattcaacttcttcctcgtttagtcttgggagggtgtatgtgcccaggaatgtattattttttccagaatttctagtttatttatgtagaggtgtttacagtattctctgatggtagtttgtatttctgtgggattggggtgatatcccctttagcatattttattgtgtctatttgattcttctctcttttttattagtctggctagcagtctatatattttgttaagtttttctaaaaaccagctcctggattcattacttttttgaagtgttttttgcgtctccatctccttcagttctgctccaatcttagttacttcttgtcctctgctagtttttgaatttgttcactcttgcttctctagtccaacatcactggtcattagacacatgcaaatcaaaaactacaataatgtatcatctcatgccagtcagaatggtgattattaaaaagtcaggaaacaatagatgctggtgaggctgtgttgttccacaactattgtggaaaacagtgtggtgattccttaaggatctagaaccaaaagtaccatttgatccagcagtctcattactgggtatgtacccaaaggattataaatcattctactataaagacacatgcacacgtatgtttattgcacactaatcacaatagcaaagacttggaaccaacccaaatgcccatcagtgatagactggataaagaaaatgtgatacatacacaccatggaattctatgcagccatagaaaagaatgagattgcgtcctttgcaaggacatggatgaagctggaaaccatcattctcagcaaactaacacaggaacagaaaaccaaacaccacatgttctcactcataagtgggagttaaacaatgagaacacattgacacagggaagagaacaacacaccagggcctgtcagggggtggggaccaaggggagggagagcattaggacaaatacctaatgcatgcggggcttaaagcctagataatgggttgataggtgcaggaaatcaccgtagcacatgtgtacttatgtaacaaacctgcacattctgtacatgtatcctggaacttaaagtaaaatttaaaagtacgcaaataataataataataatgataataatttatgacttttttcttactgcattggaatcattggcccgctgtgacctacctcatcctagttggaagtggaagtcctgatacacacacacacacacacacacacacacacacacacacacacacacacacgtttatttatttattttttatttccataggtttttagggaacaggtggtatttggttgcatgagttagttctttaatggtgatttacgagattggtgcacccatcacctgggcagtatacactgaacccaatttgtagtcttttatccttcactctgcttccctttccctctgagtccccaaagcccattttgtcatttttatgcctttgcatcctcatagcttagctctcacatatgaacgagaacatacgatatttggtttttcattcctgaattactttacttagaataataatctccaattccatccgggttgctgcgaatgccattaagtcattcttctttatggctgagtggtattccattgtttatatataccacaatttctttatcttgttgattgatgggcatttgggttgtgatattgtttggctgtatcctcacctaaatctcatttgaattcctatgtgttgtgggaggaacacagtggaaggtgattgaatcatgggggcaggtctttcctgtactattctcatggtagtgaaaaagtctcatgagatctgatgggtttataaaggggagtttccctgcacaatttattttctcttttcctgctggtatccacataagatgggacttgctcctccttaccttctgccatcattgtgaggattccccaggcttgaggaactataagtccaattaaacctctttctttcataaattgcccagttttgggtatgtcttcagcagcagcatggaaagagactaatacagtaaattggcactgaaaagactgggatgttgctgaaaagatatccaaaaatgtggaagtgactttggaactgggcaacaggtagaggttggaatagtttggaggactcagaagaggtcaggaaaacgtggcaaagtttggaacttcctagagacttgtggaatggctttgacaaaaatgctgatagtgatacaaacaataaggcccaggctgaggtggtgtcagatggaaatgaagaacgtgttgggaactggagcaaaagtgactcttgttatattttagcaaagagactggtgccattttgcccctgccctagagatttgtggaactttaaccatgagggagatgatttagggtatctggtgggaaaaatttctaagcagcaaagctttcaagaggtgacttaagtgctgttaaaagcattcagttttacaagggaagcagagtataacagtttagaagatttgtagccagacaatgtgattgaaaagaaaatcccattctctgagaagaaattcaagctggctgcaaaaatttgcataagtaacgaggagctgaatgtcaatgcccaagacaatggggaaaatgtctccagggaacctcagaggtcttcacaacagcctctcccatcacaggcttggaggcctaggaggaaaacatggtttcctgggtcgggcccagggtccccatgctgtgtgcagcctatgacagagcagaagtaccatcatctcagaaaaacaccaccactttaagttccatctccctttctagcctcatgcatttcaaggaaatcacttctcttctaactacaaacagccagaaagagcagacagtaggacacagataagacagcttgggcacagagggaggtggggggaaagtctcttgggtaactgcccaacttcaccctcatacatgggccccagtaaaactgtgggccttaataagcacattcctctcccttcgggtgcactaagatagggaggctaaaagcagactcagggggtatgcctgcagctgcacaaggatgtatgggaacagacacacaactctctctcccagataagcacaacaaagagatacagaagcagcccacacctctgataaggtctcccaccctgaatccttaaaaactcttagtctgtaagagagtgtgcctctgacctaacctggccagatgcccctctcaggtttgttttctctaaaatgaacctgtcttgactgccaagccactttcatgtttcttttctctttctttaattcttatagcctagggactcggtgctctgtgtctcagctgctccagctatggctgaaaggagccaacacagagcttgggccatggcttcagagggtgcaagccccaagccttggcagcttccacatggtgttgagcctgtgagttcacaaaagtcaagaattaaggtttgagaagcttggcctagatttcagaagatgtatggaaacacctggatgctcaggcagaagtttagtgaaggggtggggccttcattgagaacctctgctggggcagtgtggaagggaaatgtgggatcagagcccccacatagagtccctactggggcactgcctagtggagctgtgagaaaagggccactgtcctccagaccccagaatggtagttccactgacagcttacaccgagcacctgggaaagctgcagatattcaacaccagcccatgaaagcagccaggagggaggctttacccagcagagccacaggggcagagctgcccaagaccatgggaacccacctcttggatcagcatgacctggatctgagacatggagtcaaaggagataattctggagcttaaagatttgactgcccagctggatttcagatatgcatggggcctgtagcccctttgttttagccaatttctcccatttggaatggttgtatttacccaatgcctgtacccccattgtatctaggaagtaactaacttgcttttgattttataggctcataggtggaagggacttaccttgtctcagatgagactttgggctgtggacttttgagttaatgctgaaatgaattaagaccttgggggactgttgggaaggaatgattcattctgaaatgtgaggacatgagatttgggaggtgccagggtggaatgatatggtttggctgtgtccccacccaaatctcatcttgaattcccatgtgttgtgggaggaacccagtgggaggtgattgaatcatgggggcagttctttcctgtgctattcttgtggtagtgaataagtctcatgagatctgatgagtttataaaggggagtttccctgcacaagctctcctctctttgcctgctactatccacattaaatgggacttactcttccttgccttctgtcatgattgtgaggcttccccagccatgtggaactgtaagtccagttaaaactctttcttttgtaaattgcccagtctcgggtatgttttcatcagcagtgtgaaaacggttccatatttttgcaattgtgaattgtgctgctataaacatgcaacacacatatatatttaaatacttaaactttgattttagattcaggagcgcacatgcaggtttgttatataggtaaactcaaaagtttggtgacagattatttcatcaccgaggtactaagcatagtacctcaattttttttctgaatctctcccttctctcaccctcctccctcaaggaggctccagtgtcttttgttcccttaaatgattcacttcacattagtactctgcttaaagttttctgatgaaatgacgataaactgaagtggctaatggatggcttctctggtcccatcgttgacctcccgtttattctttgctgtcctgccaatgtggactctttctgtctcttggacatatgtaattcacttcttcttcttttttttttgagacagactcttgctctgtcacccaggctgcagtgcagtggcacaatctcagctcactgcaacctccgcctcccaggctcaagcaattctcctgcctcagcctcctaagtagctgggattacaggcacacaccaccatgcctggttaatttttgtatttttggtagacatgggtttcaccttgttggccaggctgttctggaactcctaactcaggcaatccacctgtctcagcctcccaaactgctgggattacaggcatgagacataattcacttctgcttcaagacctgagccctatctgtcacctctgtctgggcccctctcccataatgtcattataagttagattcttccaaggattcaggtctctccaaatatcagttcctccgagaggcatttcctgtgcttcccagttaaggtgcctacacataagctcatctttccccttgacctatttcatttattgcatagaattgatcactttctgacatactatgtatctgcataagggcttattgcctgtcttcccagtaaactaaaagctcatgagagttgagaatttttgtattatttatcactgttcacagcctggcacatactaagcactgaatagatatatgttaaatgttaaataaaagattaaaacatacaaaataactggaggagagaaaagatagaaaactattattagaatcttgtgagagaggaggcttttcaaagactaccactaagctaagaagcataatgacagacagatttgtttatatagaaacttgtaaaacttgtgtatagtaaaatccttcacagcaaagttaaaagaaggaaatatttatagcatatataattaacattggtaaagacccagttcagattagcccaaccacatgttttaaacctgtttagagaagagtcatcttgcggattcagttttgcccagacaacctttaaaataagtggaacaataatcgccatgggaaatgctgcaatacgaaagacaaatagccccatagggaagtgggcaaaagttttgaataggtagttcacacatgcaaatgaatagcacaagacaggaaaacattagcaaacttatcaataattttaagtccatatttacacaatgaaatacaattcagttgtctataaaatttgtataaatttaaaaaattagtaacttgctatgcagtcatctgtgtgggaaaacaggttctctaacatacgatttgtgaaaatctgaatgggaatgacatttctggaagccaatttagcaatgtctatccaaatttaaatgtgcagacactttgacttagcaattccatttctaagaatggatctttcctatcaataggcccaagtacttaggcagacatgtgtatacaaattattgcagcattgtttagtagaaatatgataacaatctaaatgtctaaaaataagaagaacaataaataaagtatggtacacccagaatggagttctgtgggacccttaaagagaaaagtaaatctgaattgaatatattaacttacaatgacgtctatgatatattaagagaaaaataagttgaagatcaatatgtgtacctgaattcctgatcagagttgccctaatttcatagtctggaactaaggcacatcgtcacatctgcctgcacagcagcctgcagaagcaccatacaaaggagaatggaattctatggccagcttagaggtctcatgatctatccacagagttggaggaggagcctgctgccctaaaattaaatgatctctgaactcaaagacactagccataaaataaaatattaataatatgggccttattaaaatgaaaaacttctgctcatcaaaagacatcattaaggagtacaaagagactgggagaaaatatttataattaatatatctgatgaaggacttggatctggaagacataaagagttcctataaattaaaaagaaaaagaaaaataattaaaaatggaccaaagcctttggtacctcagaaatgagacatccaaatggtcaagaaacttacgtgaaaaggttattaaagtttatgtagaaaatacagataaaaactacaatgaaattcacgctatagccaccagagtagttaataaaaagactgacaatatcaaatgctggtgaggatgtagagcaagtagaactctcatacattgctggtggaaatgtaaattcgttctgcaacttttgaaatttcttgttctgaaatttaaaactttagggtatacactcacagaaatgaatccatatactcaccaaactatatatcacaaactatatatcatgaaatgttctcaatagctttattcatgatatcacaaaaatggaagcagccaaggtgttcaatatattcacaagagaatgaataaattgtgaaatatgcatgtagcaaaaaaccacacagcaatgaaaaagaataaactactgaatcatgcaataaaacataaactaattttatgtgaatgctggaagaagtcaggcacaaaagattatatacaatattattaatttatatgaacttaagaactagaaaaactaatctacagtgatagagaccaggataggggttaccttcaggagatattgaccggcaaggggtacaatgacgcctccgggtggtgatgcacgtaatctgtttcctgagctgggtggtggaacatgactgcatacatatgtaaacattcattgtacttaagatttgtgaactttgcagtatgcatgctacatctcagttgtaaagaacaaaacaaacaaaaacctcaaaccagaaaaaagagatctcttctttctgtcttagaaaatgggggttcttttagctagaaggtggaagtttgatgcttatggctgtcggcttatcaaaagacattgtctgccacaattccattcatacacacgcatagacacacacacacagtaattcatgtgtatgtgtttatataagcatagaaaattttcaaagaatatatgttcaacagataacagtaattacatttgaagatagaactagacagaggttttaatatttttatttatacatttctgattattaaaataaaagagaaaattcatagagtgagagcaagaatcttaagggtcactaataaaatggttttgggtgagggatttgttctctatggtgaataaatggagataaacagaaaaaagatgcccaggcacccagaacttttgggggtggcagtagaaaaggttactgaagtgttaaaagctctttctgagcttatttaatcaaaatggaaaaaatctactaggaaaattaatatgccccccatgaataattgagaactgcctacagtctattctcctgaaatgacattttctctcatctgaatgatgaaaagagtaggaaagcaaccttagaggtcatctaatttaatgccctcagcaaatgtgccaatctttttcataattcttacatttaaagggtctcaaaagttgtgtgacaagtggaaaacatgtctttactaccaagtgtgcagaagacgtgtgctgtataatcaactggctagaaaacaggctgaggaaatctgccttggtttgttttctttgccacctggagcagtgtcgtgtgtgtgtgtgtatgtgtgtgtgtgtgtgtgtgtgtgtatgtatgtgtgtaagaactggagaaagaaaaagagactgatgatggaaagggaagggagctggttcgggaaacccacctagcagcacttacttaagtactgatgtgtctaacattgacagaaaataaatctagattttaacttcaatcctttcattcttgtttgctctgaatcaaaattgcatcaagaaaaagttttaaatttcagaaaaagaaaacaagatttgttctgacaaggctttctgtaggtcccattctaagtccctgaaggcagctgagctttagtctagaggtattgtatgttttctgatagtacccagtgggttttctattgttatttattgttactccttggtctttctcccaaccaactatttcccccaaccactcaacatacacaagtttcacacacgtttttttcctctggcttttgagtttccaaagtctggatactgagggaaatagaaaggacacaagcatgtgaagagtagattttaaaagaatagctgaggagcagaagccaggcttctattatcctcgaataatagagtcctctcctcagaatggggaggagaaaagtaagggaggacatgtcaagtatatagacgctggccattcctggggtgagcggagttctgtgctgggcttcttgggccaaacctggtgtgagcagaggagaatgacttcaggtcagtatgttgagggtccttatatttcactgctgaggcatatttctggaggtgcacagtgtggtgagtctaggctgataggacttgagataacctcctagattttctccatatgcagtgtgatttggatgcaacagaaaaattcccccaaaagtgactgagaaatagtatagagaatccaaatggaaagggcccagtggactggacagacaatcagaagggaaatgggcatctccaaggagactagcatgggcagtggccatcaccttagcaatgcataaacctctgaggaacttagacaaactctgcaaaaggaagggcatagggattgaattactgaattgactgagactgatttttttgccaccttattagaatttgggttcaaaatcgaaattgagttacaaaaaaattaaaagttacatatcttccctatgaaagtttcatcaccatcccataaccacggagaaggcaggaccttattggctttcattgttacataatgggttcaagttccaccacatttttctgaggcagagatttttgttccaaaaactcaaagtgttaagtagactgatttcttagaaagtctttattatttcttagaacctccactggacatgccacaaagatccttgtggatgactggttcagaagaaacagaaagggaggtacttgtggaaattgcctcaggactggtctcctttagttgaaaacacatatgggcaaagaaaatgcagggccaaatgaacttttctgcacagatctctttcaaactgcaggaaagtttgctttctttaggtgttagagaagccaacaagagcggatgtgcagggatgataggcatctcgtggtgaatgcagaatcaaccaagcatttcacggtagccagtggagttcaaccataaacattagattaactggaagcagaccaccacatcagagttgggcagaaagcttggagaagtaacccagcaaacaatgttctgcctcctgggcactcccaccatgtgatgaaatggcaccacaaaccagaggcatgcctgagagcaaagactttaacggtgccccttttctgaaattccccacttcctcttttctcctcattccttctcgtcctcctttttcttctcctccccctgcttcttcttttaattgttcccaattcaaagacccaatggctcatgttgggaaggcttttaattttaatgatggaaaatgtatcatcttccactcatctttctttctagtcctctgcaccccttctccacatacactataacactgcatgacttctgtcagctcagctgttttgttttttcttttgcattacagatgccttcttataactaaccatctggactttactgctctggaaacccaatgaacttcctctccatccacgttctactcagtttttatttagttgggtcttcactgcacaaaattgctctaaaaatgtacctgagatttgtttaagtcaaatatggtaagacacacagacagaaatgattgtgatcaaggaagaagcctatattcacaaatcacagatccttggacacagaagtcaggacatgccatgcaggacattgggaagcacaaaatcagctgggagacagaagcaggagggggcagggcatgcccagagttcctattggggttctcctgggaatgactgggtgaggcagagtaggtacactgttaagtttaggattggatagtttgaataatttcagtgggctctgggctataagactggtccccagttgtctagtaccagtccctggagtaatttaggacagagagggtattggcctagtgtgtgagaagttgataaaggagatagttgaggttgtgagctccaaattggttggtttgtataacacaggtgcactcccagaggagtcttgctatctctaggaattagctagcctggaagaggcaatctatctaggatgaagggcccaaatgccagagcatcaaaaaagaaaaaaaaaaaaagaaagaaagaaaacacagtcaatacaaactagatttatagcaaccattttcagggcacactatcgccattggtccattcatatccccatttactttatgtatttatttataaaataacaactggccaggcgcggtggctcatgcctgtaatcccagcactttgggaggccaaggtgggcagatcacctgaggtcaagagttcgagaccagcctggccaacatggtgaaaccctgtctctacaaaaaatacaaaaattagctggacatggtggcatgcacctgtaatcccagctactcaggaggctgaggcatgagaatcacttgaacctgggaagcagaggctgcagtgagctgcgatcacactactgcactccagcctgtgcaacaggagcgaaactccatctcagaaataaataaataaaaataaataaataaataataaagaacaaccatgaattaactatagaagctaaagcctgggacattatcaattattaacatttacttattagattctattctaatctcttgaagtccaatagtactttctgccgtttatcaatgcgtctcaacacctcatatggagaagatccattttgaatgtctgccagggctgcttgcattccctgtcctctcatgatctcatcagcttgaatttcaagctctttgaatgttttccaacctgtaacttaaacactggcaagcagaagaatatttcattatgctttggatacaaaatgcatgaatttgtagagatggatggtgaatttttttcatgactttgtgcctacgtaagccaccacctctggtaatggtaaaatactctctatagttcttaaatgaaaatctaataaaaatttaggaaggaaagggctttggcagagggcttttcaagtcaggtgtgaggctatggtaataccagtaagagagtcttcttactgtctagattttcagcagctccactattcattttgcatgagggctacccgacattgtccaacagcaaccagcagacatgaaaggatagggcttgtcattgcttttgagaatattaattatgatatgtcttgcatgagaaatttgagagatgttatgtttagagaaactggtggggctgttgctgaaaaatcagcggaaatcggatgcctgcaagaaaggaccctggaaaagccagcggtacacggtgacaggcaacaggtattctggggaggggtgtgttggggtaatgctcagaggacttcagaatgacttttatttcctcattatgatcctaaaatgtcttaggtatttttttccaggtgtttagaaacataaagatgaaaaaactgttgtgtataactttggctggatcagttgtttcatctagcccttatattttctggcttttctgcagctctgtgcaaaaacatccacataggttcctaggctattgctacaaacagagaaatgtgcaagaccaaggtttcatcaaaatatctgtttttctgccttgtatcctctggtaactttgtaagttggctttgttatatcttatccaacacccagtaatcaaaaggctttttggaaatctccttgggtctcaagttcaaaccaaactgtaggcctggttgttattttgtgcagataaagtgtaaatcattttctgtatgattttatttcctaagcgaactgtcctgagaaaagagtacttgggtgttcagggcgatcagaatttggggactttggctggatcctaacaatttaggagaccccatttaaaaatatttatccatccaaatgaaatgaaagggtgcttgtcctacaaatggcccctgaaataactttggaagtccaacccctgcctgaacagtggctattacccttggacactggtaagtagggcttataattctggaataattttcctttgaatttatgactcttcaacttcagttcgcacatcagccttctcgtctcctctcccacgttaaattggtccataaaactccacacaccataaaatgagatctgggcggagatgtggcaaagcatcccccaaggtaaacattatgatagactttcaccccaccccatccccagccctgccccagaagaagatggaaacaaaaggcatgctagtctggagacagcccccaaacagctgtgcattcttgttcagctgggacagcagctgcctttataaacggagacccccccttcctttctccctatctcgcttatctgagtagtggtctacacagaggaacaggaaaatgctgaagcctccctaggctctagagagctgacaccaaggacttcctgtggcctggctccagccgcatgcggaacagcctagcttgaagcagccagccctgatggtgtctgaaatatttggctcctggctccggctgtgggctggctgtctggtttgtttgaacacaaactagcctgggagtctttgtgtagaatgctccttgaagttttttccatgacatctgccaattaaatgtatgaattactctgtttactcctgtgtgacagggaagacattttattcagaagcaaaggattcctccttctctttgctttgacttcaaaaatttgatgagctcctattacgtgccagtcactggacatgatgcttggacatttgtgattttattttattcaatattatagctccaataaaatgggcttagggttatgttttttacaattgaagaaactggaatacaaagatgggaaatgattgatctgaggccacacaaacgaataaggggcagagtaggaattagaacttaagtctcctcattacaaagtttgttttgttttgctttttatcttcttcactaaaacttatttaggaataattgcttgactgttttgagttggtatttgagtctatactcatgcattcattcattcatctattcaacaactatgatttaagcatccactgggtacactaggttaaaaaactaagcactggggtctgcaaactttttctgtaaagtgccaaataatatatattttaaggcttgagagctgtatgatctctgttgcagctacttagctttgccattgtagtggggaggtagtcatgaacaataggtaggtgaatagacatagctatatatcagcaaaaccatatttacaaaaataggcaggaggttagattgggtcctgaggccatagctttctatagactaccatgcagtgcataacctccacattcatccatagcacccctagtgaggcacgacataattatggtttgactctgaatcctgagcctggaatgggaataagggttcttgtacttggactgatcctctgtcccctcaaaataaccctgagaggccctcctgaatcatcattgccctctatggtgagatgccatcccttccctaaggcacctctcttgcaacactcataggaatgttcctagaactaactaaacccttgtgtgacttgggtaggcaacgcgttgaataggagaaagtaacaagaaggtgaggcctcagagaacacggaagagtcttgcctcctcctgattatattacaaaactagtaattttaataataacaacagctaccctgattgcatgtttaggtgccgaaggcaagcatctgtattgtcttacttgatcctcaccacagcccagttaataaatattgcttttttccactttttttttttttttgagacggagtcttgctctgtcgcccaggctggagtacagtggcgcaatctcagctcactgcaagctctgcctcccaggttcatgccattctcctgcctcagcctcccaagtacctgggactacaggcgcccaccaccacacctggctaattttttgtatttttagtagagatggggtttcactgtgttagccaggatggtctcgatctcctgaccttgtgatccaccctcctcggcctcccaaagtgctgggactacagacatgagacaccacacccggccgatttttccacttttcacatgaggaaatctagactcagagaagttgggtcctcaggtcacagacccaggaagtagcagactcgggatttgagtcaaagtctgcagtttccaaagtccaggtccctcaccaccaaagctgactgtttttggaagaagaaaattaaagaactatcacctttcattagtgtcattgttgttgcctccatggaatcatgacagcaagatgaaccaagaggacctcttgatacaaaagatgctcttgctggggaagcagccacaacatatgtttctattaactgtggtcagattcctaaggtacaaggcacagtgccctctactgcccaggaggaaccctattagttcccctaacatagatggaagatccagaaatgtcagttgttgaagattgggatttgtgtcatggtgtgagaatttattagaaatcttcttttatttcttttgataactctgtatgggactggcagatatttactcaaggtgatggggggagggtaaaatgggaaaaggagagagagaagccacaatccacacagagtactttgaggcaggagaaaaagatgttcttccaatgtttagttatctcccttctgaacaagtgtgtacatcttctgtttcctagggtagcctacggcaggctgaatcctgatggcatctggaccaggaagaggtcaaggaggcttccgatggtcccacaggacatctatagctccatgccaggtagtatttttttcattactgaaaatgaaaaagttttcctggaagtaagcagacataacactgacttcatgggtccaagcaaagaggacaatgtagagacaaaagaatacaaaccgactagttgctaaaggagctagaaagggggattatttaagaaaaaaagagacaaattaaataaataaaatatcatccttcatggtacagcagtgctgcggcctggggatagaactggaaactttgtgtggtgagtactagtgggatgtgaattgggccaaaatatatttgtctccaagaaatacatttttcaaaatgctaagccttaattttttttttttttgagtaaacagccgggaaaatgccaggcttgatactttcttgaatggagccctggatgtgccatatggaagcccttgtgaggggaaacccttgtcggcctgccccaagtcttgctgctgtgtaggtccattcagttctacattagcctgtactttgaaactctgcccttgcggcatcctggctacgtccaaaccccccttccactccgctgccgacaacacatgatgtgcttcctctcttcaaagaagcagccatcttggaagaagctacagggctccaaaaaacaattttgctggtccagtaatcaaatctctgacccacagccgtgtttctctcctgccacatttttcttggctcttccgggctccatccctctaagcaaacattccctctacatttagactccttctaacactaagcataatgtaatggaaagaaacattgaagacctgggtttcagtggtttttgctattaactttctcagtgtttaacatcccagattttcagctttctcatctttatttaataatatccatcttacaatggatgttattgtcagtggaaaattagatgggacaatatacatgaaagtatgttaataaatgtaacagtcaaacaaatattgatcaaatacctgatacgggattggcattgagaaatatgatgctatgatgcaaccctataatctagtcaaagaggcagacagagacataggtagtattaatgcaatgtgtggcagttgggttgtgtttgtttgttttgatttttgttgttcttggccacagcaaaccaacctataatccattcctatttctgttccccctgccactaatttgtcttccttctttgggcctcagatttcaatttgccaaatgcatagatgaccagataatttgttatccaaaccaggatacttcctacagtaagaggaattgctgttaataactgtgccagagcaatttgtgcacatggagacttccaggcaaacagagatgatggccacactacaaatgaaatgggggcaggcatgcaacagtatctaaggattattcaagttcttacaatttatggcatttagtttatttatttatttatttatttatttatttatttatttatttattgagacagagtcttgctctatcgcccagctggagtgcagtggcatgatctctgctcattgcaagctctgccttccgggttcacaccattctcctgcctcagcctcccgagtagctgggactacaggtgcccgccaccacacccagctaattttttgtgtttttagtagagatggggtttcaccgtgttagccaggatggtctcgatcttctgacctcatgatctgcccgccttggcctcccaaagtggtgggattacaggtgtgagccaccgcgcctggcccacgttgtgattattatcaaaagcttttctcccagtccagtgactgggtttcctctttggctgccctcatgggcctggctcctggtcagtagtatgtagtgagctgaaccctgaaaatcctggttgctcccctcccgggtcaaatttgttgtaaataaaactgcatcatactccttgtgatggcatcacctgttggagcatagctacctagagagcatgggaaactaaatgaaaataaacttaaacactggcagcacaggtcagactactggggaatgtttagctcctgaatagtctcttgctccttcttggatatcttttatattaatctcctctctcaaagcagtaagccttgtgtttacatggatggacaaatttctggatgtgtatatatattaaatatatatactttcttttttttgagacggagtttcaatcttgttgcccaggctgaagtacagtggtacgatcgtggcccaccacaacctctgcctcccgggttcaagctattctcctgcctcagcctcctgagtagctgggattacaggcatctgccaccaggcctggctaatttttttgtgtttttagttagagacagggtttctccatgttggtcaggctggtcttgaactcccgacctcaggtgatctgcccaccttggcctcccgaagtgctgggattacaggtgtgagccatcgtgcccagcatatatatatatacatttaataatatccaccaactatcagctttgaaaagcttaagatcaataagagaaaaggattgatgagctgattttgtgtatctctctcccccttcattctccttcctcctgggagtttgatcccctttccacttcctctcttaacatttttatggactagagatgcaatcttaagtgaaaagtttattttttttcttttccaatgccatccaataaaagtatgcccaactacagtggtcgggaaactgaggcatagataaaatgtaggggagttcttgctaaccttgtatacacagggagctcacacaaattcatgctagatgatttgagattagtgatggagtcttgtatatatccaggctgtatgttgcatatcttcccagaatcagacacttcaacaccatcttaaatgtaaaaccgaggtgatatgtctgagctaaccatgcctcttcccaaacacatacacatgatctacatagtatgttttatcatagacttttctaggcacttgggatttgtgagaccctgaagttttctcttccagcatgctttccaatttcattatccttatgaaaagtgttgagaattatactctacaaacagattcttgaggagagttctcattatccagacatcttagagtcttgtcctaattgcttttctttatatcataaaacaatccattttggtggctcagttctagataagaatttgtacagaagaaccaggtttggtgttcagggaggtgaccgtaggtggaaagtttggggagaatgtattgacatagcaactgaattcagcctgaacctgaaagaacttacagaagactcattgggatgatgattacaaccccagacccactgacccacccaggcaaaatggaatacagggtgtgtgtgtgtgtgtgtgtgtgtgtgtgtgtgtgtgtgtgtgtgtgttttaattgtcctaattcgccatagctagcctgtggtgagcatcctccactaggacctggaataaccttgctaaacctttaccttagctggctacctgtacaggcatgaatggtcagtactgaaaatcacaagtgctggttcaaataagaatgctactttttcaaatagggatactatcttctacacacctgattcattagggatctggggaccattaatatttagtgatagtgcaggaaatgaaatggaagtggaagttagtatgatttgacctgctgagggcatgaggctgggactcctgggttaattcttgctgttttttttttttctagtataagttttactgtggttccatgatttgtgtccttccctgttggctctgcaggagcctggctgtctttatttagtaaatgtatcttgtaattcttaacccaagggcctcagattccatatggcatgtttgaaaggacagcatgcacattatctcaaattctttttgctttatatttaaaaatattatcttgaagatcaaaagtgaaagctctcctctcatgttgagtccagctgtcctgtggagtcaaggatagccctgctcagccgtgctggggtgtggagacagagtgtcctaaatacatacacagcaattttcccccttcctgtccccaccctaccttgctcttcaagtacagacaggatgctattgactcactacaaatgggaaagatgatttgaggttttcagcataacttagcaagcattaagtaagcacctatcatgccccaggctctgattttaagttcagtgatagttttaagttcaaggagagagtggttggctaacaagatgaagaagttgtatttcaagaatgtatccagtattttattgagagatgtttaaataagtgggatataaataactggaaaatagcatgtaatccacatgtaagaaagcaaattgaaataagaggcatatagtggcattagcagctcccagaagaaggagctgttaattctgcctgagggatcagagcgggattctcagatatgttaaaattcatgtagtttaaactgggttttaaatatccatacaaacatgcatttcactcgcatttactcaatgcctagtaaatgccagacagtgcagattttgaaggagttcttaccaccagggaacatatggcctacctggcaagctgagtaaataaacaattgtgagaagaaaggtttcttttgaattgttaattgtgttaatagccgcccccctccttttcttaagcattactaggtggtaggcatcattcattaactttttctactcataatctgatttataattcaaaaccatctcatacattagagtctaccctaagtttatatcagaggaaacttgtctagagttgcttagctagtcagtgagacaaccacagattggagccttgaatccatatctgttagattccaaagcccaccctattaaatattaaagagttgccctcaggggacaatgcaaagtaaaggaataaaaaatgggaaaaacataggaaagtgaaattacactacagcgtcaagaaggggcacttcctttgtagaagttaatttagattatcctgaggaattttatgtgatattggacaggaaagacagggtttgatctttgagaacattggatggcatactaagaagtctcttttttttttttttttaaccttgagatggagtctcgctctgttgcctaggctggagtacaatggtgtgatcttggctcactgtaacctctgtctcttgggttcaagcgattctcctgccttagcctcccgagtagctgggactacaggtgcacaccaccacacccagctaagttttgtattttttgtagagatgggatttcagtacattgaccaggctggtctcaaactcctgacctcaggtggtttgcccacctcagcctcccaatgtgctgggattacaggagtgaaccactgcacccaccctaatttataattctataaattatgggtacccacagcagatatatcagatagaatgtgacatgaaggagtgcatctttttggaaatatctctggataggtaatgagaatgagaatgagaatgggcttcctggatccgccatgttttcaaacatatggcaaaagttagaacttcagattgtggacttgaaattatttccttttcagaataggtataagtggtccacctgaaatttaactttacttttagtagctatgcattcaggtatgcaaaaaacaaggtactttattcttctagaatcctacttaatccctatgtgacagaaaagatagtcttattcaataattttttaaaggcgttttaggattaacctcatttaaataagaatttacttcttttttggggtggatctaaattgtaagaggctttcaaaacaggaaaggatggggaataggagatggggaggtaagtatctgattactggtcattgttatctgtttagccttgcaatattctccactctttggccataaactgcaccattctcaatctgactgtctccttacggccttctaggctccttctaccctttgcttccctctcaggggagttttcaaacgcttttcacatgattctggagccatacaagacttgggggcctaggtaggttttgccagaccttgctgattttcccaggctccagtgagaaagcaaacacaagtcccttccctcattgacccatcccaggactcaatccacagagaagaggcacaatggagagccctccagacccagctccagctctctcttctccttccacccgacttacctcctgagctcagatcttcacctagacttctacagtgatgagagtgtttgtaggaaaactagttctccctaatggaatcttctgccagaagtgtcttgtcctggtataatctggaccaaacctttgatcaaagccataaatgtgatgaatgatgcccatctccttgaataaaggagacccatgtgttaaatagagagtaaaggtgaaaacacaagggttaacattttataatattattccaacgctattaggaacttcttgtaaaccttaatactctgaagaaaacaactggagatgactttctatccatagagaaatttggccttagtagccaggtatttttcaagttggcaaattctaccttcttattttctttgatcccccaacaagggtctcatctatgatcaaagccttttttaaaacagcaactagcatattcttgaacgtataattagctaccatagtaactataaattctaatctttctctgactttccagacaacctaaataggatgccgtcactttcaccctacaattaatactccctgaagaaatatctaagtgtcatgatcttttgctaaatttgaagcatgcaagcaaaaattcggtcatttccgtcagcagttgcagtggtggcaaattcattgagttcagcaaagtacatggtcacacaacctgcgttagcaaaagaaattaactaggaacttgtgaagctgaaagttaagtaacaattgaaaaaggctttatttatacttcagtaaaaagagttggagaacagaagggaatattttttattttttagtattattattattactctaaattgtgattctaggtttgcctgttatcacttttcagagcatttatcaccaacttgcagtggaatattgtaaagattcattacagttgtgagagggcaggaaaataaactcacatctcctgcatatctggaagtgttttttaggcactgtgctgagcagtctacaatgttattctcattcaatcataatgataccttagaagtagatcccatcattcccatgttacagatggagaaacccaggttctctaagatgaagacaatcatccagcgtcaatcctgatagtaaaagacagaaacaatggctcaactgtggtctagatctgaccaaagtagaatgaatttttttcttattttattttcctgaactgaactctgtacagtcaatgattccatgactttgactcactgagaaatgcgtccatcctagtgattagtgattttcctctcccagaatacattgattacacccaggaccaagttgactttttgtcagttaaaggggagaccctggccgggcacagtggctcatgcctgtaatcgcagcacttcgggaggctgaggtgggcggatcacctgcgattgctagttcaaaaccagcctgaccaacatggagaaaccctgtctctactaaaaatacaaaaattagcggggcatgatggcgcatgcctgtaatcccagctacttgggaggctgaggcaaggagaattgcttgaacccaggaggcagaggttgcagtgagctgagatcgcactattgcactccagcctgggcaacaagagcgaaattccatctcaaaaaatgaataaataaaaataaaaataaaaaaataaaggggagacctttgttgacttctcgtttccattttgtcttcccagtcccttctcttcatatttttttttttgcatctaagagaaggtgaaggaaatgcaaaaacatttgagtgcatattacactccaagcacaacagtctagcaagctatgtattatcagcatacactgtatagattgaaaagctagggctcagagaggttttttaaaaacatgtatccaattctatttttttaagtacatttaatggtgtcaaaaaacaaagaaaaaaccttattcaggttttaatccaagatcaccccggtaagattagagcaggaagtcaaacccagatttgtcttccatcaaaaaacatcttctatttccactgttaattctttgacaaatattaacgagaacctgagtatgtgcagaacctaggtataaattagtaaataaaatagacgcagtcttgctctcacagaacccactatctagtacaggaaacaggcaatgcctaacaagtaaataagtaactattataatatgtactaatttgaaaaagaaaaactggggtatctccttagacaggaaatataggatacagtgtgtcatctattatgtttctagttacattacctcaaaggagaagctagggaaaacaggtggtctgagaattgtgctgaggaagaggggtctggaaaaaggagccagggacagaatgcagggaggatgtgtggagacagtgtgtggacagtgtgtggaggctccatgacagtaaaaaaacttggtgtgtttgagggacagaaagatgttttgttcagctggaaaggagtttctgggaaagaaggtcatgagataagttgcagatacaggcaggtgtgggtcttaaagggaatggaggttatgtaaataaatttggattccattctagattcagtgaggaacaagcagaaaacaggatatgattttcttttgaaattggttatgctggctgttccatgatgatagtatttgatggaagagtaaggtgagcctgtcttagccaggaaagccaagatgatggctcatgctagagaggggataataagtgtgtgtgtgtgtgtgtgtgtgtgtgtgtgtgtgtgtgactggcatatatagtaggggaatatatttacatgtgtgtgtgtgtgtgtgtatgtatatatatgtgtgtgtgtgtgtgtgtgtgtgtatatatatatgtgtgtgtgtgtgtatagtggactctctatatagtatagagtatataagtagatgtgaaggaggaggagccaagacttacagggtctggcctggagtctaaggaggaatcaggcagttgcaggtttctggcatgtgccatgggtatatggtagtgccattattgagacaatgaagactgaagagagaaacatacttggggagaaaatcaagaacttgcttttagatatgtaagatttgagatatcaagtagaccattggttatatgaatctggaactcaaaagagaaggtgggagatataaattcctgagttaatggcttatagaagacatttaaaataataggaataaatgcatttacctaaagagaatttggagagataggtaagatagcctatgacttagccatgaggtgttataatatttaaagatagattgaaagagaaaaactcttcaaaggagaaaaagaaggaaaagtgtagtgaggaaggagtcaaactacaagaatactaaatgctgctgagggatctggagcaggatgtacaatagaactctgtgtgctgatggaaatggtttccatctgcactgtccaatgcagatctgattttcttattgaaacactgtttcttataggacagtccaggtgtaaaaggaaaataactggaatgtggccattgagtttggcagcaagaggtaattgttgccactgaccacggagatggtaaattggaggggaaagccagtcaagtataggttgagaaaacaaagaaatagaaacagaggctttgcgtggtacatctggaatattgaccctgaagggaaatagagaaatggcatgagtgtgacagaagtatgagaatttaagagaagagtgttttatttgagggaatggaagatgccattcatttatttaatcattagatatttatagagcaccatgaagtttcagcaccgttccgcactttggggatggagctttgaattagacaagcaatatcacttttctcatgggatttatagtctattgtgtgagtaagacaataagcagcaaacagtgaattaattaactgaaggataattcattagagtagtaagtactataaagaaagcaaaacaaaatcataggagggagcaagagtgacggtagaggaagggctatttaaataagaggaccaggcagggcttttccaaatgggttacataagctgagaccagagtcatgagagaatctactcctaggaaatgatgggaatgagccagtaaagagataaagatggaaaaggtatgagaaagagagatgggcaaaggaaaacagttgaggagacaagaaaagataggcatcagagaacaaagggagggattagccatttaggaggaagtatgcctcttcagaggtgagattagtggcttgtatgacaggaagagactgaagaattattgttcctatggaacttgagaaggtgggctaaaagcataggaagtgatgatcaaacatgagatacttagtcattggaaggagttgtcttcctggtaacggcaaacccagagcataatattggatgggaaattcaggaagagtgttgcaagtgtagtggtagaggtcttcagagctgaaaaacagaaaggctggggcattggatggaacataggggtgttaatatcagtaagaatgatgcaaaaaatcagatgaggaggagaagcatgagccaagagctaattttttttacaatatattacaaatgactagataaatgatagcaacaaagagagtatatccacatggagggaacctcaaataaatagagggttttcaagagataatagaagtaactataaaaataggaatgaggagccaggaggttattgaccctacctctggtattagctgtattagtttgttctcatgctgctatgaagaaatacccaagactgggtaatttacaaagaaaagagatttaattgactcacagttctgcgtatctgtgaggcctcaggaaacttactatcctggcagaaggcacgtcttcacagtgcagcagaagagagaattagtgccaagtgaagggggaagccccttataaaaccatcagatctcatgagaactcactcactatcacaagaacagcatgggggaaactgtctccatgattcagttatctccacctggtcctgcccttgacatgtggagattattaaaattcacagtaagatttgggtggggacacagagccaaggcatatcacctacctatcccagaatatatggaagttggaaaaataaagtttctgcttgagaggacttttagcaaatgctgctggttctttagctaagactagttccatcccttcctgttgctcaaaaatcccaatcatgtattcagtaccagggaatgaatactgttttgtttaggattacaaagtcagcatcatccccttatacagatttttttttagtgttggtcctttgtcaggattatgtttttatttttcttttctttttttattttaaagtatttattgacaaagattgaatatatttgaggttcataatgtgatgattgatatacatattcattgtgtaatggttaccacaattaaattaattaatgcactcatccccacccatgctatacataattagatgcctgtactagtccgttttcacacttctgtaaataacttcctaagactgggtaatttataaaagaaaaaagtttaattgactcatagtttggcatggctggagaggcctcaggaaacttacaatcatggtggaaggagaaggggaagcaggcaccttattcacaaggtggtagaaaaagatagtgaagaagaaactgccaaacatttaaaaaaagcatcagatctcataagaactcactatcataagaacagcagggcagaaaccacccccatgatccaatcacctcccaccaggtccctccctggacatgtggggattacagttcgaaatgcaatttgggtgggtacacagattcaatccatatcattccacccctagcccctcccaaatctcatgcctgtttcacattttaaaaccaatcaggtcttcccaacattcctccaaagtcttaactcattccagcattaactcaaaagtccacagttcaaagtcttgactaagacaagagaagtcccttccacctatgggtttgtaaaatcaaaagcaagttagttacttccaagatacaatgggggtacaggcattgggtaaatgctcccattccaaatggaggaaattggccaaaacaaaggggctacagattccatgccagtccaacttgcagtcattaaatcttaaagctctgaaataatctcctaaccaaaataagctcctcacatccattgcatgctgatacaaagggtgagctctcaaggccttgggtagctcagtccctgtggctttacagggtacagcccccacagctgctgtcatgagctggtgttgagtgcctgtggcttttccaggcacacagtgcaaactgtcaatgaatctacctttctggggtctggaagatggtggccctcttgtcacagctccactaggcagtgccatagtggggactctgtgtggagcttcaaccccacatttctcttctgcactgccctagcagaggttctccatgagggctccatccctgcagcacactcctgcctggacttccagacatttcaatccattctctgaaatctagacggaggtttccaaagctcaactcttgtcttctgcacacctgcagacctaccaccacatggaagccaccaagacttggggcttgcaccctctgaagcaatggcctgagctgtaccttggcccctattagccatggctggagctggagcaactaggatgcagggggacaccaagtaccgaggctgcacagagcagtggggccctgtgcctggcccatgaaactatctttttctagtaggctttggggcctgtgatgggagggactgctacaaagatctctgacatgccctggagacattttccccattgtcttggctattaacatttggctctcattacttgtgcaacctcctgcagctggaattcctcccaaggaagtgagttgtccttttctacaacatgatcaggctgcaaattttccaaacttttatgctttgcttccattttaaacataagttccacagatcatctctctcaagttcaaagttccatagatctctagggcaggggcaaaatgccaccaatttctttgctaaagcatagcaagagtgacctttgcttcaattcccaattaagttcctcatctccatctaagaccacctcagcctggacttcattgtccatatcattatcagcattttagtcaaaaccattcaacaagtctctaagaagttccaaactttcccacatctttctatcttcttctgagccctccaaactgttccaacctctgcctgttacccagtttcaaagctgcttctacatttttaggttatctttatggcagcacccaactctctacagtaccaatttcctgtattagttcgtttttgctctactataaaaaacttccctgagactgggtaatttataaaggaaagagatttaatggacttacagctccatatcacgggggaggcctcgggaaacttataatcatggagaaaggggaaggggaagcaggaccttctttgcaaggcatcaggacagagagggagtgtgaaggaggaactactaaacacttttaaaaccatcagatctcataagaaaccactcactatcatgagaacagcatggtggaaactgcccccatgatccagtcacctcccacaaggtcccttcctccacacatggggattacagtttgagataagatttgggtggggacatagagccaatccatatcaattcccaaaacttttaattttataactgaaattttgttccctttggccagcatcacccaatttcccccactcccagcccctggaaaccaccatcctactctctacttgcattattttgacttttttacattttacatataagtgagatcatgcagtatttgtctttctgggtttagtttatttcacttagcctactgtcctccaggtttatccatgttgtcacaaatggcaggattttctccttatggatgaataatattccattgtatatgtgtaccaccatttctttatccactcattcatctatgcacactgaaatcgtttccatatctttgctattgtgaataatgcttcattgaacataggagtgcagatatccctttgagatattgatttttcctttaggtatgtaccagaagtggaattgttgaattgtacagagttctatttttaattttttaaggaacctccattctgcttttcataatggctgtactattttacacttccatgagtagggttggtgggacaaggcaggagagttcccctttccccacactcttgctagtacttatctcttttttcataatggccatcataacaggtgtgaggtgatatctaattgtgattttgatttgcattttctcaatgattagtgatagtaatactgagcgttttttcatatgcctattcaccatttgtatatctttggaaaaatgtctattcaagccctttgcccatttttcgatcatgtgatttggcttttggtgtgttttgtttctttttgctattaacttatgtaagttctttgtatattttggatattaaccccttattagatagagaatatttgcaaatactttcacccattccatagtttgcatttttattttgtggattggtccttataaccacttagaagagattgacaatcatctattactctcattctgagtatgtcattggatgaagccttttaggcaagggttctcaggaggctcctggtaatgaggttgcaatgattggcagctgcttcctgggacatcactggttagtatggctgagtggggagtctgagggtactaaactagaggaagagagactgaaacttcagtttctaaatctgactgtgccagcttctctcctgacttgaaactggagagccattattgaccttagttcttccagcaacaccccatcccatcttcctttaattccactttaaaagcccattcttaaactcttatttccctcttggcacaactagtgtgttattcttcaccacaaaggctctctctacttagtaatttaaagcagtttacgtcagaatgacattaattaggtcaggatccattgaaaccccttgtgaaagatattttttttttcttttttaaataatgaaatgcagggaaactactctttgtgcagtgaacatgagagcttacagggttgaggaattcaataaatacaggcagctaggggtgattaaggacaagtcaaatctttaaaaggataaagtatatagtttccaaaacacccatttctgggtataggctgaagactagtatcttttgcttataacttgttttagcaaaattccagcatttaattattagtttggtgaatgaccacaccagaccatttagtgtaacgtgacaggccctgaagggagtagtcagtaatttgaaacactaaccatgtgttttgtctgaaaaattaatacgtgtagcatgattagagtggcagggttccaccaatcaaaatgtagaaaaaaactccatagtactaataaaggcagttactgttctggcttatggaagacataatagatgctatatattaataattcactatgtgccattgctattaatgaattatctcattttatcttcttgcccactatacaagctagataataacaaaaagagctaatattgttgagcatacactatgttccacaaatttttacatgtgttattaatctttcccattcttcataatatgataatatccctgcattaaacatgaaaaaaactgaggatttaaaaagtgtaactaacattaatagtacatgagagaggcaagacttaaaataagaattatctaactctagtgctcatatccttaacagcaactgtatatgaaaagatgagtaaaatcagactaacctcgaggaagtggaagattgtggactagatttgggcaaagtcttaactgcacatattttaaaaaatattagttccactccatcatgtttaattacaaatagcgtctcctattaggctagtcaatagagatccttgaggatttattttaatgattaccaagacagacttgtaattgcacagatagatttaaagggcttgcaaagaacttgttagaaatcataacaataggcaaggtgcagtggctcacacctgtaatcccagcggcaatttagagaccaaagtgggcacatcccttgagctcaggagtttaagaccagtgtgggcaacatggcaaaactttgtctccaccagaaaaaaaaaaacaaaaaacaaaaacttagctggatgcagtggcacacacctgtagtcccagctacttgggaggctaggacgagaggatcacttgagcccaggaggttgaggttgctgtgagccacgattgtaccactgccctccagcctgggtgacagggtgaaaccgtgcatcagaaacaaacaaaaagaaatagtaataaaagtcaccatttattagagacattatcacaaatactgactacaactctggaagatagacactaacttattagatattgatggattgccttctcaacgagtcattgtcctcctctccatttttaacaattttagttgaactgtccactttacttttgtggttttatgctgcaagtgaagcgggctcaaactgcagccttatgggtgaatcatcatgaaactaagccagttataatgatgcagccactcttaccagtgatgggcacggccatatagcacaattctagctgataagatatgaaaagcagactgcacaggaactctgaaaagggttgcttcctcattgacttagagtccacaggaagaaaacatcctcttcctccactggtcattgttatgcctgtatgtgatgcctggaatgactactacctcttatgacagtaaggggagtctgacaagcactaaagtggatagagagaaaatagaggggagaaaaccccaagggcatgatgatgttgagttgctaattcaccaaccctacttttcttacctcaaaacttcctgcagtgtgagataataaattttctgtatcaattcaggtaaatcagggtgttgtttgtgtgtgtgacctgcagctcaaagcttcctaaccgatagatttgtcatccctatgatgctgagatggaaaacagggttcaagcaaattgagtacttgcctaactttgcattcaataaatgatgaagcaggatttatatggaagtttgtatgaccccagagcctgtgctttgctgtaacacaccagatcttactcttccctccataggctccgtttgtgttccaaacccctttctccctgggagacttgagggcaataaaaatgaatgtttcactgcatgctgaatttctccatctgcatgtgcagatggggatacagtaatgcgtaagaagtcttctcaggtcttccatgacactctgccagcacacatgctaaaaaaaacaaaaaaaaacaaaaaacaaaaaaaaaaaacctttcttcagtgctacattaaaatgccttgatggcttgccgttgtacaactcaagattccatctcagaaattctaacaaatcaatagcaagaaaagaaataacccaattaaaaatgggcaaaggactggaatagacatttctcaaaagaggacatacagatggccaacaggaatatgagaaaacacactcgacatcactatcattagggaatgcaaattaaaactacaatgaagtaccacctcacacctgttatagtggctataagaaaaaagaggaaagtgtcagcaagaatgtggaaaaaaaggaacttttgtacattattggcaggaacataaattggtacagttactatggaaaacagtatggaacttccttaaaaaaataaaattagaactaccatatgacccagcaaccccactactgggtatatctccaaaggaaatgaaatcagtatgtcaaagagatatctgcactccatgtccattgcaacattatttacaacacccaagatattgaaacaacctaagttgttcatcaatgaatgaataaagaaagaaaatgtgatacatatacacaaagtaaaactattcagcctctaaaaatgaagaaaatcctaacatttgtggcaacatggatgaatccaaaagacattatgttaagtgaaatgaaccatgcacagaaaattaaatatgacatgatctcacttatatgtataatctaaaaattcagactcctagaagtagaaagtagaatagtggttattagagctgaggttggaggaaaggactggagagatattgatcaaaggagataaaatctcagttatccaggaggaatcagtttaagagacaggaggaataagcttaagagatatattgtacaacatgataattaaagttaagagtaatgtattttactcttgaaaattactaaaagagtattttgggtgttctccacacaaaaaaatgagatgtatatgaggcaaatatattaattagcttgctttagtcattctacaatatacacctatttcaaaacatcatattatatactgtaaatatatataatttatatatgtcaagtaaaaaataataacaaatttaaaaatctgaatttaaaaaatactccctgtctccttatcagtacctacaaggcccaatcaatctggcctctattttcctcatctttttctacccagacagcctcatgatggaggactcagtacaagtcatttctcatttcttccaagtacattctccttcccccctttgagcttctgcaagttcgatttcctccaccttgactactcttatttctcttctttactgacatacttccttctcatccttcaggtcatattttgacatcactttttgtcctcttttaagtcttctaattctcctttaaatcacttatcacagtgatatttgcttaatttatctaaatatttacttgtttaatgcccgccctccccccaaaattgcaagctatagaatggcagaggctgtgttgatcttactaaacactaccttctctggctcttagcctgaagaattgaatttggggtatactcaataaatatctattgagtgagtgaatgatgaatgaagaaagccctctactgcttgttcatatagggagaaaggagtgatcatgggtctgcttagatgggaaactgggagaagcacattgtattagtctgttctcatgctgctaataaagatatacctgagactgggtaatttataaaggaagaggtttaattgactcacagttgcgcgtggctggggaggcctcaaaatcatggtggaaggcaaagaggagcaaagtcatgtcttacagggtggcaggcaaagagagtgtgtgtagaggaaccccatttataaaaccatcttgtgacacttattctctgtcatgagaacagcatgggaaagacttgcccgcatgatttcattaccttccactgtgtccctcccatgacatgtgggaattatgggaactacaattcaagatgagatttggatggggactcagccaacccatatcacacatatatgtatattttttccacactctaaatctggcctagtcttacaacattgtctgccatgcccctattctaatctaccatcatcttcccttgaacccacacactgccccgcttcttaggaacctggctttcagtcatgccttttaaactcacattcatccagtatacaccagttcattctccacacaacagctacagtgatatttagcagatcatgtcattgctcactcttcactttactttgacaagtggagcaagatccaatgttcttcaaagttctacataatttgactgtgcctacctgtcatgcctcatcttccaccagcctctccctggctcaccatgttgcattcactctggcctgtttctgttccccaagcacactcatcaaaccttttgctcctgatatatattctctgccccagacctatgcagggctgcctaattatcagtaggcactatcactcagattccatgactaaagtattcctcagcctttacaagctctgccccattactctattgtattttcttcatatctccctcattgtctgaaaaaatatttttatttgttgatttaggaatttattgtctgtttcccactactaaaatagaagctgcttgagggcctgcatctcatcagtcttgctgtctatgtatgtacatcactttgaattatgcctagcacacaggaagaacaaaacaataatttcccaaatgaatagatgaatgagtgcactcaaagaggtgagttattgcacagttaggttcagatttgacaaatatttattgtgccattcaagcaagaatgccatgtaggtatggaaattgcaaacatgattatgatccacttcaccctcaaagtgcccaaatactgtactaaggattgctgtatgaaggaatgttctcatatggtataagtgttgtagtagatgcatacaaaaaaacaaaaaagcacttggggccctagatggcaatgatcatgtctcctttcaagaatcaggacaggcttcccaagggaactcttgaggatgagtaggagttttccaaatcatttttgggatatctcagcatttcaagaaaagataaatgagtgtccaaggaagtagagtcatatatcaagttggtgtgttgggaaaactgatgggttttccatggctggaatgtagagtttgtgagtaaggagaagtacaagctaagctggagaatagataaaacagaagtccactcaatattctgtcatccctctacaaatagtgccccttccactggaataactctccactccatgtggcccttgtgtagcctctatcaataaccgtacaaggctttctggctctagaatagggcttgtgatgcatttataaccatcttagttcactaatcccctgcatacagtgatttgccaaggagcgatcaggctcttccctgatattttatatacagataccagtagaaagtggctttattcttttcctgaggtcattaagctgggataatattaagctagaaaagtctacggccatgtattctgcccccacttttttcacttccccattacaaaagactaaaagagtttgagacatagaaaagagagagagggagaagagagcaccggacatatatagaggtccatatatagagacagcatttggattctcagaagcctcagagccagttccatcccctaaacactctagttattatataaaccggtatatttctttttgtttgtactagtttgtggtgtatttatggcaattgcacccagagtattgaaaaacatactgtggtgtttaggttaatgtagattataggaagaaaagagattgggagaaaatgtaatatatttactcttggacatgctaagtttgagatgcttatgggaacacccaggcacagatgtccaaggggtaattaaacatatgatcctgttattcaaaagaaaggaatgatctggcaatataaatttagagcctgttgggataaatttgattgttgcagatacaggcctttataaaataatttatggaaagtatggagagcaatagaaaatagaaaccaaggaaaaagccctagggaacaatctcttgaaggaacatgggtagatgaagagaagagcttcaaggctactgagacaatgtctgagagggaagagaataaggagagaggggacttccagaagccagagatgtaaattattccaaagagattgttctggataagaatcctaaatgatgcagaagtggagtatgataaggtctgtattcattaggtacatgctacaatgacaaattaactccaaaacccccttggcttaagaaaacaaaggtttacttcttacttgtattatacggccattgctggttgatactccatgttgttactcaaggacctgggacggctgaggcttccccatcttataaccacagcatatggatcctgaaccatcctagccactgggatggaagaaaagaggctggagaccacacatgagcacatcactgcctccatctaaaagagaataggagaaaatgtaacatatttactcccggacacgctaagtttgagatgctgagatattgctgagacaatgctgacacaatgtcttggcacacatttcactgaccagcactagtcacatgattctgactgtttacaaggaaactaagaaatgtaagggacacaatgggattttggatgtggtgagcactactgtctccaccacagaaacaaagaagtaacttttggatttgtcttatccataggtctttggtgattttaacaggagcacattcactggagcaatgaggctggaaaccaggaccatgttaggtgcttttatagacttcagtatactttaacacatttaattgtgacataatcctgtgaaacaggtattaatgttgacattttacaaaaggggacactgaggctcagtaaatgttactcagtgactggactattagctatttactgtttgctaagtgtcaaaactggggattcagcaaaacagagacacatccctgacttcatggagcttatgatcgtgtacaatatacaagcaaatatgaaattacagctctggagcatgctggaaatgaagctccaagatgctgtacatgggagccaataactagcctggcacagggatgaatgaatgcttcaccaggtgggtgatgagtcagagttcagcacgcagagttgtggggttggggtgacagtggcgtatccattcttcagatagaggaaagagtatgtgcagggcattatgtcacatgagcggagtttgaggtactaaaaggccagtgtgcctgaatcataaagaaccaggagaaggaagcatgatgtaagatgcagcttaagaggtgacatgagacagggctgccctgattcctgtgggctaagttgaagatagtaaagccatctaatatctcagcagaagtctgttggcttgcttgtctctccagaattcattgtctcaaataatcagaccaaagtcacagagatatgctaagactctaacccaagtccagcctcctcgaagctggtccacctctcttcactaaactccagctgcctctacagagaaaacaacaccaagttcagctggagatgaagcaagtgttgatagacaagttctgtgttggcattaccgagacaggtgttcctattatcacttagtgtccctcccacaggaaatctcacacacaactcacaaatagatgacccatttgctgtgcgtgtcagacattttctcctcctttctcctctcttcccagagggaaggactcacaggggttcagggaagtaattttatcaggtttcaaggcttctcatttttgttcatcagctttcccagcacatgaagaacagtgtttatctgatttttcaagggctgcatttgggggagtttgcttcattcgcctgcaactctgaagtcattccggctggtgtacgaaaaccttgctgctggatttagcttggtctcccatgagttaaaatcagactggtgaaaactagacagaagtgctgagggggtggaatggaagaagaggtgacttttgctattgagatatttttgttaatgtgaattttgaagtaaacatcatctttgttcctttcccctctcttacttctgtaaagaaagatagagaaggataaccttactctttaggagctgtactgacaaaagtaacaagaacatatcctgccctgcaagagtagcattctatttatcagtctaataaggtgggaacgtgccttgaagtctgcttccccaccacaggtccctaaatcttgtttcaaaaagttgcaggttcccagacagctgtgctttagagcactgatcactaccctccttccctgccacctcctaagcattttggtggttttttgctctagcttttcaatcaaatctatgaatttaaacatcactccaataagaatttttcagaatgcctttttcttcagcagggaaacttcagagaaacgactttgactctcatacaaacagatgccccatgagaaaataattgtaaaatggggtgacatttgaacttgtacttatttattcaagaatgaaaccacatagacctgagatgtaactgggatgggatagcacagtacttcagagtggagggctttgcaaagggctccttgagcactgatcctttatctgttagtgattaactgtttaacaatagacaaggctacaggaaagtactatgtcaatcctcggtttcctcagctcaaggtcttggtagttaataagatgattcaagtaaagagactaacaccatgccgggcatagctcttgtgactttggcaattctgaagtggcgtttaagcttcagaatgcattttatatcctgctatttcatcatcaaccatttctgttttcagccaacattaattgatcacctagtgctgatcatgtagattctggaatttgacggtactttggctcccagccctccaggtgttcacagccaacctgagtgcactgacacacctgtgggccaggaagtctgcacttccttatgctgcctcctcccacctctctcagagccatcatgagcacccggctgtgtcctaaaccctgctgcgtcagcccctgttgtgcgagcatcttaggtatgtgatgaacacaggcatggataaggagggttcccacaaagaacagttggtaccaggacagtgaccataagcagctgagtttccctagtgttgtgctgttatctctcaagtaggagagccaggcagaagagccacggagccactctgaagtctctggcctccccccgctgtctgctgacgtgatgagggaagggaagggacagacagcactagccttctgtcaccagattatttatagtcggcttttcctttgaagtcctcgctgcaccctccacagcctccactacagcttgccacatggagtgtggtgatggacaccagcaaagtggcactgtggggagcaaacttctctctgttgtgctcaagggagactgctcgaggagctcctcctgaaacatcccctgagactgaacaaagcccctcgctgaagtctgccagaacaatgctccaggcagttgccattctttcactttttaggggaaaagcaacagagcctctttccagtaggtcatctgtccatttttttctccctgtggctttgacgttgggttatctgtgggttctccttgctgctctgttttctttggttagtaagtcctccttttatcattaaaaaagaaggaatgaaacataatagattgaaggcagagcttttggccacctgtcctgaggaatcagaacacaaggcagcaaccctgtgtggcccagtcctgcaataagcactagggaggcacagatgaatgcatgcagacacctttcctctctccctcacacacacaacatggctttcataggcgacagtcttagtcactcttatttcatttgctgtcccactttgacccctggtacctaagcctaccttcctcacacattctcagaagcttctgcctctcacctatggcttcatcttcctcctccagcttcatttaggtctctgaaacttgatcatggctatgtttctagaccagatctatactgagctttaagacagtctctttttttttctacctagtatcaggactcctgaccctggacctacctgggactgattcagaaggtttgcccaggtctcatcaaatagggggtggagcagtgagacctaacacctgccttcaggagagacacaatctggtaggaagcagcggctcacccattttaaaagaatgtgataagaaccacactcgaggagtggttaaagcagtttcccaaattggggtccctgtggcacctgagtcagaatcaccagaggcactagttataagatacacattcctgagccctaccaccaaactaaggactcagtatccacattttaaataactttcttatgtagatcccatgaaaataaaatgtgaaaaccatgtattttaaaaatactggcaaccagtggtattgttactgaaactttaaacataccctgtattagtccattttcactctgctgataaagacatacctgacactgggtaatttataaagaaaaagaggcttgatggactcacagtttcacatgactggggaggcctcacaatcatggcagaaggcaaaagtcacatcttacatggcagcaggcaagagagaatgagagccaagtgaaaggggaaaccccttataaaaccatcagatcttgagagacttactcactatcatgagaacagtatgggggaaaccacccccatgattcaattatctcccactgggtccctcccacaacatgtgggaattatgggagctaggagctgcacttcagatgatatttgggtggggacagagcgaaaccataccattctggccctggcccctctcaaatctcatgtcctcacatttcaaaatgaatcatgccttcccaacagtcccccaaagccttaactcatttcagcattaactcaaaagtccacagtccaaagtctcatctgagacaagataagtctcttccacctatgagcctgtaaaatcgaaagcaagttagttacttcctagatacaatgggggtacaggcattgggtaaatacagccattcaaaattggagaaattggccaaaacaaaggagttacaggccccatgtgaatctgaaatccagtgaggcagcccaatcttaaagctccaaaatgatctcctttgactctgtgtctcatatccaggtcacactgatgcaagaggtgggttcccatggtcttggaacccacccttgtggctctgcccctgtggctttgcagggtacagcctccctccaagctgctttaatgggctgatgttgagtgtctgcagcttttccaggcatacggtgcaagctgttggtggatcaacttttctggggcctggaggatggtggccctcttctcacagctccactaggcagtgccctagtggggacagtgtgtggggacttcaaccccatatttcccttctgcactgccgtagcagaggttctccataacggccccattcctggagcaaacttcttcctggacatctgggcatttccatccatccccaaaatctaggcagaggttcccaaacctcaatacttgacttctgtgcacctgcaggctcaacaccatgtggaagctgccaaggcttggggattgcaccctctgaagccatgacccgagctgtaccttggccccttttagccatggccagagtggctgggactcagggcaccaagtccctaggctgcacacagcaggggggctgtaggccctgcccatgaaaccattttttcctcctaggcctctgggccagtgatgggatgggctgtcttaaaggtccctgacatgccctggagacattttcctcattgtcttggtgattaacatttggctcctcattagttatgcatacctaactaacctagtctgcagccagcttgaatttctcctcagaaaatgggtttttcttttctatcgcatcctcaggctgcacattttctgggcatttatgttctgtttcccttttgaacttgaatgcttttaaaaaagcccaagtcacctcttgaatgctttgctgcttagaaatttcttccaccagatactctaaatcatctcccttaagttcaaagttccacaaatctctaaggcaggggcaaaatgctgctagcctctttgctaaaacacagcaggaaccatctttactccgattcctaacaggttcctcatctctttctgagactgcctcagcctggatttcattgtttatatcattatcaacatttttgttaaagccattcaacaagtctctaggaagttccattttcctgtctttttctgagacttccaaactgctccaacctttgtctgttacccagttccaaagtcacttccacattttggggtatctttagagcagcgtcccactctcccagtaccaatttactgtattagtctgttttcacactgctgataaagacatacctgagactgggtaatttataaagaaaaagaggtttaatggactcacagttccatgtggctggggaggcctcacaatcatggcagaagggtaaaggcacgtcttacatgttggcagacaagagagaatgagaaccaactgaaaggggaaatcccttataaacctatcagatcttgtgagacttactactatgagaacagtatgggggaaactgccctcatgattcagttatctcccactgggtccccccacaacatatgggaattttgagagctacaattcaagatgagatctgggtggggacagagccaaataatatcataccctaagaaataacagcaagtaggaaaaccttatttgaccagctaagaaggaactcagaggctttgggaaaattactcttctgggcttcagtggtctcacctctgttaggagagggttggtttaatttgtctcccaagttccttccaggtcaatttgcctctaaggctaggattctgtcagaagggtggtttctaagcataagactaggaaaaggactcacggcagttttaaagtcagggtgggaggcagagacgagataagagtggggctgtgacatcattaattttgagacacagggaggggtatgaaaatagataattcagctttgtaactttatttttattattgtttgagacagggtctcactctattgcccaggctggagtgcagtggcaccatcatagctcactgtcacctcaagctccaggctcaagcaatcctcctgcctcaatctcccaaagcactgagattacaggcatgaggcaccatgccagccacaactttgtaattttcgttagctttgtataaatacttgttaagggacccttctgcaccttaattttgccttttgaaaaaagggacaaatgaaggctgttgtctgacattctttaaaagtacatagtacagaacccagcactctgcaggtgttcaatacgtggtgaatattatcatcacacagtgtagtattgaggattaacaaaattatgttgcaagatccctgggataagttatggcagaaaatagatcctcagacaataagtatccttttttccaatgtgctagaaacatattatattggattatttaattcaacaaatatttattgagcgcctagtctctgggaggtatctggggtacagtggttactgagatgaccatggtctcaaccaacattatggtcttggtagagatatagacaagtaaagggattattaacacactgtgtaattgatggcaagccataagaaaaacaaggtattgtagacagaagagggtactgcagtataccaagcttgtgaagaagaacaggtgaaaagactcagaagaaagagggagtatgacacagccagggaaataaaaaaggttagagaaataggaggggccagttcacaaaagaccgggtaagtcatgctgtttactgtttcacttaacctaagggttatggagaatcactggtgtgttttaggacactcacactgatagtaaggtggagaaggaactgggtataaaaccagaggcagggacttcaagcaggaaactgatgcagtaatcctggtaaaagacagtggctgtaggagtaaataaaaacagacagattccaggcatatttaagaaacagaacccatagaacccatgattgattttattttcagggggagggggtatagggaagtagtatcttagggttagtccatttgtttctctgatgatcaaagtgaaacttccacaacttttcattaactattggtgaaggctgacctatattgaaaattgcagattgtatatttaacaagtttattttaacaagtcaatcccttcactagcttaggtttttttttttttgttgttgttgtttatactttaagttctggggtacacgtgcagaacatgcaggtttgttacataggtatacacatgccatggtggtttgctgcacccatcaacctgtcatctacattaggtgtttctcctaatgctatccctcccctagcccccactccccgacaggccctggtatgtgatattcccctccctgtgtccatatgttctcattgttcaactcctggggaggatgtggagaaataagaacgcttttacacttttggagggagtgtaaattagttcaaccattgtggaagacagtgtggcaattcctcaaggatctagaactagaaataccatttgacccagcaatcccattactgggtatatacccaaaggattataaattattctactataaagacacatgcagacgtatgtttattgcggcactgttcacaatagcaaagacttggaaccaacccaatgccaatcaatgatagactggataaagaaaatgtggcacatacacaccatggaatactatgcagccataaaaaagaacgagttcatgtcctttgcagggacatggatggcgctggaaaccatcgttctcagcaaactaacacaaggacagaaaaccaaacaatgcatgttctcactcataagctgtggttctttttaagcagactgtggtctcccaaattttggagagattacattgagttagtttttttttttttttttttttttttgacagtttcactcttgtcacctaggccagagtgcagtggcgtgatcttggctcactgtaacctttgcctccagggttcaagcgattcttctgcctcagcctcccgagtatctgggataacagatgcccaccaccacccccacctaatttttgtatttttagtagagatgggattatggggtttgaccatgttggccaggctggtctgtaactcctgacctcaaatgatccacccacctagacctcccaaagggctgggattacaggtgtgagccaccgtgcctagccgagtcagaatttttatttttggcttttggagcttggattttccatgaattccacctctaacttcccagaacaaactaatttacatcttcagatgcaataatgaattttaaccacttgatggccacatttcaaagtcttttatcttattttcctacttcaggcaattttctgtctattccagttgattgcctctgggactaggtaaatctgcccttttcttaattagtaggatgtccatgctttcatccataagatgatctgccctggatccataataggcctttactaaaaagtgtttaacaaacaaatgaccaaatgaatggatatcagtgaaaacctagttttcaaatacttgtgacaatatgtgactacattctgtttcatacttttgaaatccagataactacccttttacatcaactagaattcagataactgcttttttctattaatagaaagaagtaaaggttttagaaaatgatttagatgcataaagattataaccatataaataaaattcttaataaaagaagttaccctttttgattcttatccataaccaactaattctaaagcttacataattgtttacatttggtatatgtctcatatatgcaattgcactgtgtgccttttattcactcaacatttaacataagcattctatttttgtcaatctagtttacaacatattaaatcttatgaactatatgatagtatactgaagaggtaagccaaaatgttctgggtcatgtccttatcataatacattaggccatttctggagattgtgataattaaaaaaaatgttgtgagtgacatttgctaggggacagtcccaatacatgaagaatacagtatgactgagcatggtggctcacacctgtaatcccagaactttgggaggctgagacagatcacttaagctcagaagtttgagaccagctaagcaacatagcaagaccctgtctctacaaaaaaatttttttaaattagccaagcatggggatgtgcacctgtagtcctagctacttgggaggctgagatgggaggatagtgtgagcccaggggttggaggctgcagtgagctgtgatcatgccactgcactccagcctcagttgagactctgtctcttaaaaaaaatacagtatgcttttcagcaaatgaaatattaagatccataataaagttcacatattcttacaggtaacagtatttatgaccaaaaaagtccagccataaaagcttagagaaaaggaaagtcacatctaaacattgtcggtggaaggggtatcctcaatattaagacctggggtagttccagtcccactaacagaacaatacctagaattggtttgtagccaagtggtcttaaatatgcagatcccattgacaaaaacattcaagacagaattttagtctgatatcattaaatatgcaatttatctagcatgctcatcaagtaaacttctcattagaatttggttttccaggcagatctgccttcagggaaagaacatgtccctcctccagtttcaagtatttctagcccttctgtcaatgatttctcattataaatttattggcttcctatgcagttttctacagaaagaaaatgtactgaacagatgtacttcaaatatttctgacccttatgatagtaatttctccctataaataaattaaatgccatcctaatttaatacatcagtctcatgagctcagaaaatatgagtctctttctgagagatggatctgttcaggatgtattaacaaaatcagatctgagcctgtagaactactatagtcagatgctagactatagtaaattctccaaggtattcattctacgttgtccagtttcttgagatacagcttggctgttttatctcctggtggcccggcgttaatgtcactactggtattaggatgaggccaggctttggagaagctgaagtttatatgaactgagggaggaagagaggatctctttaagaaaaataatgcaaaattatgaatccaaaattaactaggcaattcaatatttatttggaagtcacaataaattagaaactttgaaaagctggtcaataccacatatattgtgattgcagaatatttgtgttaaccaactgttctatatgtctctataacactctctcctacatttttggcagtattttcaatatagagaaaatagaaaaaataattcagtgttttttctagaatggttgcatcattgacagtttacaaaaaatatctttaccattctattcatcattggaaatgtcttctttttgaatgtatgcattaaaagctataaattttcctctaagcactacttttgctgcatcctacaacttttgataagttgtattttcatttttatttcatggctgctttaaataggtcttccttttcctttgtttttctgctattccattacattttgtaaaggttatcctgcttgagatgtgctgtgattcctggatctgaagcttatgtttttaacaattctggaaaattctgacccattattttctcttgaaacattgcctccattccattctctctgacctttctttctggaattgttattaaaatatttgttaaattattaccatatctgttaatattaggttcacattttccaaagatttgcttcttagtgttatattttagataatttttttatctaactttttattcgctaattttctatttggctgtgtctaattttctgtcacgattttaatttcccttgccatggttttcattttttaaaattgtatttggctctttttaaattttgctttgtcatttgttaaatctttttatttttaattcatatttaaaacttgtttattcctttaaacataaaacttatattctgtgtctgataattccaatgtctaaaatatttataagtcagattcagctatttttgtactgctgatattcacaggatggtttgtttctatgtgtattttgtgatatttgattgcaagttgctatttttcttggaacttatctgagggtatttaattttaaggactagatcaaagtcatgtttctccagagagaatttatatattttttagctctttcctgtcttgggaacactatcaaactgtaccatctctaaatataataatatacctgtgagagatagatagatagacgtgagatatgtgtgtatgtatcactctatgtataattatatacctgtgtgagagagagatatacatatagacacataaatatatatatatgtatctgtgagatatctcacaggtatataattatatatgttatataattatataacctgtgatatacataataatggtataacatatataattatacataggtatatatcagagattacataattatataatgatacatacatgcacatcacatatttatatacctgtgatatatagatatctagatatgtatataatatatacataatataattatatatttaacatataattatatcatatataattatgtatatatcacaagaatagctgcatatatatcccacaggtatctaattaggtagatagatagatggatagatagatagataggcagatagataactcacaagaataactttcatttggaccacaaaggtgcatgaggcctggcttgtggtttcaaattctaagagaaatgttttcctttccagtcaatgctaaggtagaaaccagcacatttccttacagttatcttctgttcagcaggctttttcttatttttcttaacaaagaagatgcagtcctttgcagtccgtataggtactgactttttatagtagtattctgttaactagaccgtccgtctggagtgaaccctggattctatctcctcccctccctaagcctccctggcactctgcatgattgtcaaagcagaagctcacattctcctaagttcagcagaaccttcatggcaaaagatggctttgtttcttctttacctcccaggtttcttctttcacttgatttttggcctctgtagattgctttttatagtcttagatccatgatgcacttccaaaggagatttcaacatttcatccagcattttgttgttttaatcatctatcatcactcaaaaaagagttagtatagcaagtctgagaataccgtccttacagaagcctgtttgcaaagttagcccttggctagtatctggaggcttctcaccattcccaaaactggtaatagtggttcactgtgcctacaacagtacaagccatggggtttatgttgaaaacctactttccttccagaattgtgaaattttgacatatcataggtggagggcctctaagtgatcaagccctaataaaagccctggccactgagtctttaataagattccctggtatacaacatttcacaggtgttgccatactcattgctgagaaaatgagttttagctgtgaggaggacactatgctgcatcctatgagtccctctagcgaatctccaaagccaggagcagtctgggggacttcaagtgcaaccatgctggcagaaagtctcccaatatactttcttcaaagaggttataccccatctaatgattataaatcactgtaaactagaaatgtcaagttagagatagtcatctttgagttgagtcagacagtacctcactattgtgtctttttaaaaatcacatggtcatagaatattgcagaatgacagcaaatgaccacggccactgatttcttctcctagccctgttctttgttgtaaactggagacaattttccactttttttggtccaaattagtgttatcaacccatatgctggaatacatgtattccacattttggcaacagtaattgtatggcaaaaagtcattccatggtcaaataagtttgggaactgttggtaaacaaatttgaacgtgtttctttactgtagaagtgctcagaacttttaatatattcatctttaataaaaacatatgatagtcagtattttcaaaacttgtttgacctcagaattcttcttacccttggaatatctactaacatatcttgggacattaatgttcttgaggcatagtttagaaaatgctagaataaaaacttgcctctgtcttttggaaagccttagttcttaagtgttttcattatttactttgcttgttggcttaagtcatttagtgatcatctttccagctactgcaacaaaatcattagagctttaaatcattctgaaatgcccagatttacttgtaggagtctacagtgcccttaagctcaagatgtctcatgcttactaggaaataattacatgcctactggagatagccagccactttgccaactgcagctccaatattgtcatttgcagaatggacttgataaaacttacctaccacatggcactgatttcaaataaaaaccctttatatgagcagattttataaattagtaagcaatcggggctggcagccaagatggccaataggaacagctccggtctacagctcccagcgtcagcgacacagaagacgggtgatttctgcatttccatctgaggtaccgggttcatctcactagggagtgccagacagtgggtgcaggacagtgggtgcagcgtaacgtgcgctagccaaagcagggcgaggcattgcctcactcgggaagcgcaaggggtcagggagttcccttttctagtcaaagaaaggggtgacagacggcacctggaaaatcgggtcactcccgccctaatactgcgcttttccaatgggcttaaaaaacagcgcaccagaagattatatcctgcacctggcttggagggtcctacattcatggagtcttgctgattgctagcacagcagtctgagatcaaactgcaaggtggcagcgaggctgggggaggggcacccaccgttgcccaggcttgctgaggtaaacaaagcagccgggaagctcaaactgggtggagcccaccacagctccaggaggcctgcctgcctctgtaggctccacctctgggggcagggcacagacaaaaaaaagacagcagtaacatctgctgacttaaatgttcctgtctgacagctttgaagagagcagtgattctcccagcacgcagctggagatctgagaacgggcagactgcctcctcaagtgggtccctgacccctgagccccaagcagcctaactaggaggcaccccccagtacgggcagactgacatctcacatgtccaggtactcctctgagacaaaacttccagaggaacgatcagacagcagcattcgcggttcacgaaaatccgctgttctgcagccactgctgctgatacccaggcaaacagggtctggagtggacctctagcaaactccaacagacctgcagctgagggtcctgtctgttagaaggaaaactaacaaacacaaaggacatccacaccaaaaacccatctgtacatcaccgtcatcaaagaccaaaagtagataaaaccacaaagatggggaaaacacggagcagaaaaactggaaactctaaaaagcagagtgcctctcctcctccaaaggaacacagttcctcaccagcaatggaacaaagctggatggagaatgactttgacgggttgagagaagaaggcttcagatgatcaaactactctgagctacaggaggaaattcaaaacaaaggcaaataagttaaaaactttgaaaaaatttagacgaatgtataactagaataaccaatacagagaagtgcttaaaggagctgatggagctgaaagtcaaggctcaagaactacgtgaagaatgcagaagcctcaggagccgatgtgatcagctggaagaaagggtatcagtgatggaagatgaaatgaatgaaatgaagcgagaagggaagtttagagaaaaaagaataaaaggaaacgaacaaagcctccaagaaatatgggactatgtgaaaagactaaatctacatctgattggtgtgcctgaaagggacggggagtatggaaccaagctggaaaacactctgcaagatattgtccaggagaacttccccaatctagcaaggcaggccaacattcagattcaggaaacactctgcaagatattgtccaggagaacttccccaatctagcaaggcaggccaacattcagattcaggaaatacagagaacaccacaaagatactcctcgagaagagcaactccaagacacataattgtcagatcaccaaagttgaaatgaaggaaaaaatattaagtgcagccagagagaaaggtcagattacccacaaagggaagcccatcagactaacagtggatctcttggcagaaactctacaagccagaagagagtgggcgcaaatattcaacattcttaaagaaaagaattttcaacccagaatttcatatccagccaaactaagcttcataagtgaaggagaaataaaatactttacagacaagcaaatgctgagagattttgtcaccaccaggcctgccctaaaagagctcctgaaggaagtactaaacatggaaaggaacaaccggtaccagccgctgcaaaatcatgacaaattgtaaagaccatcgaggctaggaagaaactgcatcaactaacaagcaaaataaccagctaacatcataatgacaggatcaaattcacacataacaatgttaactttaaatgtaaatggactaaatgctccaattaaaagacacagactggcaaattggataaagaatcaagacccatcagagtgctgtattcaggaaacccatctcacgtgcagagacacacataggctcaaaataaaaggatggaggaagatctaccaagcaaatggaaaacaaaaaaaaggcaggggttgcaatcctagtctctgataaaactgactttaaactaacaaagatcaaaagagacaaggaaggccattacataatggtaaagggatcaattcaacaagaagagctaactatcctaaatatatatgcacccaatacaggagcacccagattcataaagcaagtcctgagtgacctacaaagagacttagactcccacacaataataatgggagactttaacaccccactgtcaacattagacagatcaacgagacagaaaggtaacaaggatacccaggaattgaactcagccctgcaccaagtggacctattagacatctacagaactctccaccccaaatcaacagaatatacatttttttcagcaccacaccacacctattcaaaattgaccacatagttggaagtaaagctctcctcagcaaatgtaaaagaacagaaattataacaaactgtctctcagaccacagtgcaatcaaactagaactcaggattaagaaactcactcaaaaccgctcaactacatggaaactgaacaacctgctcctgaatgactactgggtacataatgaaatgaaggcagaaataaagatgttctttgaaaccaacaagaacaaagacacaacataccagaatctctggaacacattcaaagcagtgtgtagagggaaatttatagcactaaatgcccacaagataaagcaggaaagatccaaaattgacaccctaacatcacaattaaaagaactagaaaagcaagagcaaacacattcaaaagctagcagaaggcaagaaataattaaaatctgagcagaactgaaggaaatagagacacaaaaaaacccttcaaaaaactaatgaatccaggagctggttttttgaaaggatcaacaaaattgatagaccactagcaagactaatacagaagaaaagagagaagaatcaaatagacacaataaaaaatgataaaggggatatcaccaccgatcccacagaaatacaaactaccatcagagaatactacaaacacctctacgcaaataaactagaaaatctagaagaaatggataaattcctcaacacatacaccctcccaagactaaaccaggaagaagttgaatctctgaatagaccaataacaggctctgaaattgtggcaataatcaatagcttaccaaccaaaaagagcccaggaccagatggattcacagctgaattctaccagaggtacaaggaggaactggtaccattccttctgaaactattccaatcaacagaaaaagagagaatcctccctaactcattttatgaggccagcatcatcctgataccaaagctgggcagagacacaaccaaaaaagagaattttagaccaatatccttgatgaacactgatgcaaaaatcctcaataaaatactggcaaaccaaatccagcagcacatcaaaaagcttatccaccatgatcaagtgggcttcatccctgggatgcaaggctggttcaatatatgcaaatcaataaatgtaatccagcatataaacagaaccaaagacagaaacacatgattatctcaatagatgcagaaaaggcttttgacaaaattcaacaacgcttcatgctaaaaactctcaataaattaggtattgatgggacatatctcaaaataataagagctatctatgacaaacccacagccaatatcatactgaatgggcaaaaactggaagcattccctttgaaaactggcacaagacagggatgccctctctcaccactcctattcaacatagtgttggaagttctggccagggcaattaggcaggagaaggaaataaaatgtattcaattaggaaaagaggaagtcaaattgtccctgtttgcagatgacatgattgtatatctagaaaaccccattgtctcagcccaaaacctccttaagctgataagcaacttcagcaaagtctcagcatacaaaatcaatgtacaaaaatcacaagcattcttatacaccaataacagacaaacagagagccaaatcatgagtgaactcccattcacaattgcttcaaagagaataaaatacctaggaatccaacttacaagggacgcgaatggacctctttaaggagaactacaaaccactgctcaatgaaataaaagaggatacaaagaaatggaagaacattccatgctcatgggtaggaagaatcaatatcgtgaaaatggccatactgcccaaggtaatatacagattcaatgccatccccatcaagctaccaatgactttcttcacagaattggaaaaaactactttaaagttcatatggaaccaaaaaagagcccgcatcaccaagtcaatcctaagccaaaagaacaaagctggaagcatcacgctacctgacttcaaactatactacaaggctacagtaaccaaaacagcatggtactggtaacaaaacagagatatagatcaatggaacagaacagagccctcagaaataacgctgcatatctacaactatctgatctttgacaaacctgagaaaaacaaacaatggggaaaggattccctatttaataaatggtgctgggaaaactggctagccatatgtagaaagctgaaactggatcccttccttacaccttatacaaaaattaattcaagatggattaaagacttaaacgtgagacctaaaaccataaaaaccctagaagaaaacctaggcattaccattcaggacataggcatgggcaaggacttcatgtttaaaacaccaaaagcaacggcaacaaaagccaaaattgacaaatgggatctaattaaactaaagagcttctgcacagcaaaagaaactaccatcagagtgaacaggcaacctacaacatgggagaaaattttcgcaacctactcatcttgacaaagggctaatatccagaatctacaatgaactccaacaaatttacaagaaaaaaacaaacaaccccatcaaaaagtaggcgaaggacatgaacagacacttctcaaaagaagacatttgtgcagccaaaaaacgcatgaaaaaatgctcaccattactggccatcagagaaatgcaaatcaaaaccacaatgatatagcatctcacaccagttagaatggcaatcattaaaaagtcaggaaacaacaggtgctagagaggatgtggacaagtaggaacacttttacactcttggtaggactgtaaactagttcaaccattgtggaagtcagtgtggcgattcctcagggatctagaactagaaataccatttgacccagccatcccattactgggtatatacccaaaggactataaatcatgctgctataaagacatatgcacatgtatgtttattgcagcactattcacaatagcaacgacttggaaccaacccaaatgtccaacaatgatagactggattaagaaaatgtggcacatatacaccatggaatactatgcagccataaaaaatgatgagttcatgtcctttgtagggacatggatgaaattggaattcatcattctcagtaaactatcgcaaggacaaaaaaccaaacactgcatactctcactcataggtgggaattgaacaatgagaacatatggacacaggaaggggaacatcacactctggggactgttgtggggttgggggaggggggagggatagcattaggagatatacctaatgctaaatgacgagttaatgggtgcagcacaccagcatggcacatgtatacatatgtaactaacctgcacattgtgcacatgtaccctaaaacttaaagtataataataataaaataaaaaataaataaataaaaataaaaataaataaataaattagtaagcaatcataggtaagaaaattgttaaatctacatatctgctcttaaaactggtaaaggaatgacatatagattagagatagattcactgattatttaatgctgctgcttttagggagccttcttgggtacttttttggaaagagaagataattttagtggatttcttacatggtcacccaagacactgttggtagaatttacaagttgcccacatcttccattatgaccatcggatcagaagttctctaatgatttctttagccacagggtcacataaaaggccaacggagttacgcctgtaaatgcttgtcagcaataactgatatctcccttagcaacagcaaatgattttgacttccaatttgcctgagcagacaaacattatctttgataaatacttaattcctatcaggatttttgaaatcctgaacattgacatttcctggaattcctccagtctctctgaagacccaggcggggaacagcccctctatggtctccaagttggcaaagagtagctgtgaagttgaacgtgggtgagattaaaacaatgggcaaaggaataaatggaaccctcactgccatatttcttgctggatatataataatatagcagtatttatcttatagcctggatccattaattttgacctcagattgaataattctgtaaggaagtacttacatccactgcaggagactgagacaggcctctagcagcaatagcaaagctggagcatgccacggctgggtcccagatgccagagctggaataggtaaatagctggaagaagagtggcaggactaaattcactagtgccatcaagttcaaagagtgtgcacaaataagacagctaagcaagccaaaaaatcaaaagctgagacacaaacaagaaaaaaggatgagcagcagaagtagaaattagatgataaaatgtagaaaatgttcagcgaaaagcaaaaagaggcccttttattgcaatggctccaatggcatagtgaatggagagtctgcccggtttaaagactggagccaaggtcaaacagcatgcactgtgttcacatgtccatacctctctctccctgtgcaacgctagctcaggaggttatgctgcatttgctttaaaagacagtaactccccatacctgctcaccaacacaccagactcagcatcttaccctataggaatagccacacatagtgttaaaccaaaaaccaaggagttgtgttgcccccgatctccaaacactaaatatgagctgctttctgtgtcttaaaccaaatgctagtattaacttgttctctcatttgaaaagaggaaatgatgtgaaatggatttgactcaagaggaagctgaatgcaggactataggtgtcctcaccggaggagctggtgtgagattcagttgaaaagccataagtgctgttaaaaaaaaagtatttatcttagccaaaggattaaagctggcatagagcataaacctggttatccccagtatgtcacactttacatttgcgtaggagcttaataatgctctcacctgagtcattgcatttgggttcatatggcaactctgtgaaagagacaggaaagtgactggtaaccacattagaggacagccacagcaggagtgaggagctgccactttgctgcctctatagaggaggaatgccagtccacatttctcagtgcagagcttcatttcctggcctgggatgtcaggggaaagggttgacctggagtcctggcattctacttcccatggcaatcctcacgctcatcttagccccactgcagctgttgctatgctcctctcccagagctggaatttgttcagcccttgccagagattacaagagtcagaatgagctggtggtgtcaggttgcacccctggccataatagagggacaatcccatccaataccctgtgagacagcccagctgttgcccgaatcccttcctctggagtccaagatactgtgcattctctgagaccccacactttcctgggcataagactgtcaaacagagtctatctaatatcattcaccagctgactggggtttgctctacacttggctggtgacaaccaccaggtctctgggtatggggttctgtccctgttctctggtacctaagcactgcagagcacatgaacccatcgagcttattgcctgggaatggtcctaggtcttcatatccttgctgggacagagtcctcacaggatgaaagtctctctggacattcagtgctctctggcctagaacagaagctcccctgccatcattcagatttggtcttgatctaccagcccccagtaaaggctctggagggatagagctagatcctgcattctcacattcctatgagctcttataagttcttgcctcattctaagtttggtctttcttttattctttcatgttttcaaacttaaatattgtttaggttcacttaaaaggaaaaagattttcacagaccctcaatattgcctcaaattatttttattattaaagtatatttaaggttttgaagtactaatttacattctttatcaggaaactcatctctctctcttgaatatcatctaccactaatgctttctttcaagtctggaatggggaagaaggggagtataatgtaggagaaaaaaagagaagaaagtcttttcaaatgagagaaatacttgcagaagccctagatagataagaaaattaaaaaaaaaacaagctctaacaaaaacctagcctattctgacccaagagattgtgggaagaagggaaaggtcagggagcagtcggaggtggagaggacatagccccacttaacatttgggagtttggaaggaagtcaccttgcaggcacaccagtctgggggtgagttaatcaaaggtcatttggtttcgtgtaagcaatgtttctcaaagcgaagtcaacagactagcatcatcattacagtcctactaaatcagaaacttgaggtggggaccaacaatctctgttttaatgagctttatcattaaattagctattttgctgcacaccataatttgagatgtagaggaaggaccgatatttagcactcccaaatttctatccacttctgcttgcctttaaaggggaggatgcataatatatctgagtggagagctgtgagactaccatgaagtctgtggtattgagaggtgaaatagaaaccctaagccatgggccagctgtagagtggggggtagaatgttggaggcctatgcagcataagacatatcaaagatgaaactgagtcatgttgggaaaactcataggccaaggcaagagagaccagatcctgtggcacaccacaggtgggcttcacagcaggccaaggcaggatgctcagggatagaactagtggtgcttgaagggaacaaaccagccctgccactatgcagcaagtataaatgtctgctctgcagactctaagacctctgtcatccattgccatcagccacataccctcctccagacacccagatgctatcaaagagaagatctgggagagagaaaggaaatgtaaaagaatgcatatattacctaaaaatgtcaagaacttatctaaaaaggcttttgttttggcattgaattaagttgaataaattagactatatttttgttttttcttccgcaattcaatggatgggggctcataaagaagaccatatcagctacagagaaatatgagatattgtatttcttagtatatctgagtaaagtacaaataaatctacaaacttgagatattgtatttcttagtatatctgagtaaagtacaaataaatctacaaacttgactttctataacattacttcagtctgtatggccagtaaacaagttgtaaaatcattttgcttacagcttatccataatgataaaatcaaaataaattttaaaacttcagatcaaaaacattcatagaatatggtagatattgttttgttttgttcacccatgatttctttctattatcataactgaaatcttcagtaatgattctagaattcaagtgggtaaaaacactctaagtcaaatgaaaatccttttaaaaaacattcttaagtataaggaaagtgcacaaatcacaagtatacatatcaatgatcttttcacatattgaatgtataatgcaacaaccatcctggtcaaatggtcaaaaatagaactttatgagaattctaatagcccaattccatacccttccccaatcactatgcttcttttccacccagtcttagttcatttgtgttgcttgaaaggagtacctgaaatggggcaatttataaagaaaagaggtttatttggctcacagttctgcaggctgtgcaagaagcacagctccagcatctgctgctgttgagggcctcaggctgcttccattcatggtagaaggcaaaggggagcctacgtgtgcaggtcacatggtgagagaggaagtaagagagggaggtgggtggtgccagacttttttaaactactcactcttggaaacagagtgagaactcactactgtgaggacagcaccaagccatttatgaaggatattcccccatgactcaaacacctcccattaggccctacttccaacgtgggggatcatatttcaacatgaggtttgggggaacaaacatccaaagtacagcactccatatattagatttcatttttgttaagttaaataagtagaagcatacactatatacactttcaggtctggattatctcattcgaaataatacctattgttttgtgcaactatagtttttccattttcctagctgtgtaatattcctttttataaatatgtcacatttgtggatatttggggttgtttccagatttttagttattatggaaaaatcctgctatgaacattattttatgtctttaatctatacagtcacacatttctattgggtggaatagcagtgaaattgctaggtcatagggggtgtgtgtttagtttagtagataatgcaacactattttccaaaggagttttacggatttatattaccaccagtttataggaattccctttgctacacatcctttaaacatttggcattattgttggagttttatcttttgattatttttgcagtatcgtatggttttaatttccatctccatgaatagattgaagtaggatttccttgtggttgtaattgcatttccttgattacttttgaagataagcccttttaaatatttgtattgccttttgaatattctcttctgagaagagcctgttcaactgtcttgcccatttttacaatgtgttgtgctttcttattgatttgtgggtattatatatcatggataaaaatgctttgtcaattatttgtgctgcagatattttctcctggtttatgacttacatgaatcaaatatttatatttcttatttataaattagaaatatttaggatatttagaaatatttactttctaattaaatatttagatgactagaagttcataattttaacaaagttcagtatccatcattagaaatctaccctatctcgaagtcatgaaaatattctattttatctcccagaaacatttttgctttacacagctagatctacaattcttctggaatttatttttgtgtatagtatgaaaaaagggctgagtttctttttctcctatggctatccaattgacacagaatcacttattgaaaactcaattcttgtcgccattgctctgctggggctaattttattataaatcaagtgttgactgggtgcagtggctcacacctgtaaccccagcactttgggagatgaagcaggtggatcacctgaggtcaggagttcaagaccagcctggccaccatggtgaaaccctgtctcctctaaaaatacaaaaattagccaggcatggtgacaggtgcctgtaatcccagctcctcaggaggttgaggcagaattgcttgaacctgggaggcagaggttgcagtgagctgagatcacgccactgcactccagcctgggcgacagaaccagactctgtcttgaaataaaaataaataaataaataaagtattgatttttgtggttctatttgtggagtctctatattgcttcactggcctattgataagtccttgcactagtgtgcactgtcttaattgctatgattttataataaatcttggtattgattatagtaaatctttcctacttctcctccttccccttcttccttttcctctgcaagattgtcttggttattcttagccctttggatatctgggtgaaaattaaaggcacctcatccatgatgtgccaaaaaagattgtgttggctattcttgggactttttattttcatgataatttttaggatcagcttatcaaatacaaacagcaaaacttcttgggatctaaattgacattgcactgaatctatagatcagtttgcggagaactgatgtcattacaatactaaatgtcccaatccatgagaatggtgtttccctcctttatttatggctcctttattttcgctcaataaaagtgcacagtgttttgaggtagagttattactcatcttttgttagatttattcctagtatttgatcttattaacactattataaataatcaaatgttttagatgtccttttctgaccatctgttgttgttataaagaaatacaatgcatttttgtatactgacaatgtgtctaaaaaccttgctaagtttttaaatttattctaatgaaaattcttgtgtatattctacatgtataatcgagctatctgcaaaaaaagactatttaatttgttattcccctgactctatacatttattatatttactattattttcaatggcaaaaaccacaattacttttgcaccagtatgatgcctttttagctgtgcaggacttccagtatagtattaaataaagtagttgacattattttcttgcttgacttctcggaaataaactttttgtcatatcttcattaagtatatattagttcatcatatatattactgatcagtttaaagatgtatcctttgttactaagctgttaaaagtttttctcattagtggatgttgaattttactgaatgctctgcctctactaaaattattatatgtttatttttttccttattcttttatgtctggtttctttaacacttggtgaatttactcatctttttgttacatgtaatcaccagtttgttcttttttattgacaagtagtataacggtaggtatgcaaagttctttgttcattctcttattgatgaacatttgagctgtttccagtttggatctgttaagaataaagcatttgtagacattgtgaaggctttttgtgaatatgtgccttcatttttcttatataaatgcgtagaagtggaaattttcttttcattttcaatctgtatctatgtatttaagttctttcttttgtaagcagcatagaagtagttctatttttttcattcagtctggtatttatcttttgattggaaaacttagttcaaaattaatgtaattatagatacatttgagtttaaatttatcattttctattagttccacatatcctttttcccctcttctctcctttcttgactactcttggagtttttttttgtttgtttttatttcatctgccctcctctttggcttggacgttactctcttttttattcttcttttagaatttaccttagaaatcatagcacatatccctggtttgttgatatctaacataaattagtactactttccagacagtacaggaactttaaatatattagcccttataccctagtcctttccaacttacataattttattgccatatgttttgattcaatgtatgtttaaaattatgtaatatgtgttattattgtcttatacagttaattttccctcatgtatttgccttttctattgttctttctaattttggcatttttgttcctctatctggaatcatattccttctctctgaagaactttactatttcctttagtggggtctgctgatggccaattttaggcatttactttcttttaactcatggcacatatcgctctatggttgtcaagcttgtggtttttgttttctgttgaatgagctgccaattttacttttattcctttgaaggtaatatttatttttttctctggtttttaatattttccttctgtttttagtttccaatagttttactatagtaggtctagatttattttctttatatttattctgtttgggcttcatagtacttacatctgtggcttgatatttttgtcaattccgtatatattagccgctatctctttaaacatcgcttcttccttattttcttctgtccttctttttaggatttcatttacgttagacctttacatgccatatatctcatgtttttctgcagtggggataatttttatccttttctccattcatactttaatccatatcttttcttccgacctcttctttcacaaattcatattcatctctcaatacaaaacatccctcaagcctacatgtcagtggtatcaaactatttcagttcccatgtcatgctctctgtgccatttgtcacaccaccctctctgtccagaatgatctttctgccctcattcatcttttaatactgatccctggcatcatctactcctgcatgatgttttcttgaccccagacagacccagttactcatatattctcacttacctcctacagaccagcctaagacctccacaagattccatgcatttccttgcctacacatctgtctcccacttgtagactggaaattctggtgccttattcatcttcagatctctaagacctagcccacagtccagcccacaaatagatgctaagtaaatcatcactgaatgaattagcaaaatatactcaactcaggttacacattagaataacatgggagggtgttttgaaaaacgatgatgtttaagagccacgctaaatcaaatctagaggtgggacttcggcatcagagaaggtttcttttctttctttctttctttctttctttctttctttctttctttctttctttctttcaactttagagaaaaaataaaatagcacatgattctaatatgcatcctgggttgaggtttgcttatttaattaatctgctttgcaagagtgatttcatgatgaaattttctgagggttaaaacagattccttgtgaagaagcatcagagcatcatgaagagcatcagaagatgtgcatgttgggtgatggatttgggtgcagccgtccatagagacacataaccaaaaaccctagcagaaactcactctctgtgcatgtgcaagcatgtgtgtgtggttgtgtgtgtgtgtggttgtgtgtgtctatctctgggaggtgagaatatggaatcccgagggtcacagaagtgacagcatggaactctaatccagatgcttgagttggtaaataatctgaagaaaactcctattttctatctccctctataatagtaaaagctaagtgatgttggccagcaccatccctatctgcaggcaggaaggtgcatagtccccattcatcccaagactttagggagatagagggtgactgaaaaagtcacacagagtaagggaaaacctgatgacaggccttaggtgaagctgtcatcacaactgccccaggtcagacctctcactgtgctgatgtgtgtgcttctccagttgtcatggaaaccggatctttcctcctgattctcatcccctttgctgtgtgtttggtttctcattttttaatacaattaagtatgcactgaaatgtgcacacttcctcccttataaccacgtttctcccatatcaaagcagctcaagagttgtcttgtgccttgtgagacaagcgggtgctgggggaagccctggtctcctcactcctccgtcctctaaagctgctccccacttggcttcagcagttacattttgacacttgagatctatgcattccaacacatgagctatttttgcgttcttagattatgcacagaagaagaaagtggattaataaaataataagaaagctggtggaagattctcttgatccaaaggggatatttgtaatgtgctaaaataattaagaaaatgaccctaattgcagaaaaagaaaagcagccctctgttgatagcaaactgagtttaatagagtgttaaggaggccactgtagttacaagatatctcaattgttctcttgacaagaatttgggtctccagttacattcatgtgtagtgtgctgaatcctgttcctgcaagtcttctgaaatgtttattaatgattttttttcatgaagaaaagtttctaaagacacaagctaggtacttggttctttgctgctttcagttgttaagacaaagataaaatggttatattttaggagtatacttggtgagcattttcgtatttcttcttctggaatcgtggtaaacgagaagtagtttctttaaaaaccagtggaggccgggcatggtgtctcacacctgtaatcccagcacttggggaggccaaggcaggtggatcacctgaggtcaggagtttgagacaagtctggctaacatagtgaaaccccgactctactaaaaatacaaaaattagccaggtgttgtggtgtgaacctatagtcccagctactcgggaagctgaggcaggagaattgcttgaacctaggagatggaggttgcagtgagcagagatcgtgccactgcaatacagcctgggagtcagagcaacattccaactcataaaaaaaaaaaaacaaaaaaaacagtggaggttgggagagggattgtctatggagttcttcagctatattgtccgaggtttctgtcacgaccatctctactggtcaacagcaacccttcctcagatgcagccggagccagttttattcatgctttctgtaatgccccatgtcagccttgtcccataagtgtactcatatcctctttctcctctgaactagtctgcatttctctacaccagaagttgatggaaccaacctcagaggcaggacaatggctggaaataggtgttacaggaggtaaatattatgaatccagtaagttgaatgccttgtgagttatattgggtatgtgtttgtttcacccaccaagtaacacatgcctctaggatccatagtgcccattctttactgtcactgaacacagctaagggcttatactggtcagccctcattcagaatctcaagtctaaattacattacccttggcccttttggtctaagcatgtgacatacaacataggacagaatgcattatgatcacaattattcctccatctaggttcaccgtgtccctggaacattgctgaatttgtctcaaactgtttagaaactcatttctgatattctggcaaaaattcctttgagtttggggatttaccagatttagaagtggcagagatgtttatttctttgtgtgccttttttattcacttatgagaattctaaaaccactgaagcagccccgatttattttgctgcactgggaccaagagtaacctgcaaataaccagctaaacctggtgtagacgagtcagtcttccaacaaagatacattagcctcaacatcagagttaacctgttgttcaatattgaacatcaaccactataagagattaaatagtcaagcctaaggaacagaacattcactcagagtgttacctgaacaattcagaactgggaacctattttgtctttcacacatcagtactcaaaatctttaggcagaaacttaatttacatacctttttagggaaacatgactatttcttactaatgagtaacctggaaattcccttgaccttaaacctggtaggcagagttatcaacaatgtaaacttccccacaatctctggcccacaactctccattttaaaatcacaggatgtgccagtttcaaaagcaggaacacccatccacccctgctatgttcatttccatcactcagcgtccagctttttcaatgcgtcctgacctcaacaaactctaatcagtgtatttttattttatcctcggcatttactgactcagcttgtgtgtcagtcaagcgaagccagatgatgccatgttaacaaaaatccaaaattttagttgcctaacacaacaaagacctatctttcacttacacaaagtccacaatgggtcgagcaactctttagggtaactgttctccatgcaaaagctaagcaatgcagttagaagaagcctccatcatcttatatctgtatcacaggtatactcaccaggcaggaaagaactgtctagaacaggggttgggaagcttaaagatccagatagtaaatattcttgactttgcaggccatgacatctctctcactactattcaactctgccagtgtagcatgaaaacagttttagaaaataaataaacaaaatgagtatgactatgttccaataaaatttaatttacaaaacaggtagtgggctgaatttggccagcaggccacagttttctgactcccggtctagagtctttcagtgacaatgaaatgcttttacctggatatggcatatatcactttgcccacattttatttgctaaagcaagttatatggctatgccttcaggagccagagagatataattatcccaagttttcagaggagaaataggaacacatttatgagcagtaatgacttcacgttttccatgctattttataaagacgggcataaatgggaatactaagaatggaaattagctagccatctgctatggtctgaatgtttgtctcccctaaatttgtgtgttgaaattctaacccccaaggtgtaggtattaagaggtgagaccttttgggaggtatttagctcataagagtggagccatcacaaattggattagtgcctttataaaagagactcaagggagctcatctgcccctgccacgacgtaaggacatagagagaaagtgccatccacggattaggaaatagaccctcatcagacatccaatctgccagcatcttgatttggggcttcccaaccccagaactgtgagaaataaatttctcttgtttataagctactccatgtattttgttatagcagcctgtgatggtttattttatgtgtcagctttactgagtgaaggaacacccagatagctggtgaaacattatttctgggtgtgtctgtgagggggtttctgaaagagactggaatttgaatcagtggactgagtaaagaggatccgccctcacccatgtgggtgggcggcatccaatctgttgagagcccagagagaacaaaaaggtggagaaaggggaattcattctctcttctgaagctgggatatctatcttctcctgcccttgggcatcagagctccagtatctcaggcctttatccagtatctctggtacttgtacaagcctgccgcacccactccacccccacctcttcttaggctttggccttagactgggagttacaccatggattcccttgattctcaggcctctagattcaaattgaattataccaccagctttcctgattctccagcttgtagacagcatatcaagggacttctcagtctccatagttatatgagccagttcacatgataaattccgtgtgtgtgtgtgtgtgtgtgtgtgtgtgtgtgtgtgacctattggttctatttctctggagaaccctgactaatgtagcctgagcagactaaggtaccatcttagatttgagtcttaaatcttaagtcacctagttgttctccatgaccccgggcagatcagtttaacttcttgagagtgtcagtatccccatctgtaacatgaagactgcctttctagaattatttgaggatcaaatgggatattacaagacaaagttttggaaaccaaacagagactcaggaagttacaatttgctattgcaccttgggtttcaccagacccagtttcaggatgtccttcaactgaacatttacacatattcacaaaaatgtgggcattggcgtactctcacttctaagctcaacgtccaaagtggaagcttcttccaggcctttttcttagggatccagagcagaagtccaaaattcttcttttctattgtcttcagagtatggggtacagcccataatattgcagagtgagcccagctggaaactctcagtgaaaagactagctgagctaaacaagggggaaaaaagacatgctacctctttttttgaggcaaaattgctttaatgtgttatgcaattttttcctgcctgccttttctctcttggtatccaggagagtttcaaaatatcttaaacggttctcctaaacctcttcaatccttgtgcatttgtgagtctgacatggtagcctttaattccactctgtgttcaagtttctggggtggctcagaaatgtgagagtcaaggaagatggtgcaggtgaagggaaaaaggaaaaccagagttaagagcaagggagagacagtttctgagaagcatttgaaggaagggaactaatgcccattgagtattttctctgtaccaagaacattgtactcattatctaattttatgcccacaataatactgcattgcaggttgtcttatctccatcaaagaaaatgaaactcaaagagtttagggaacatgcccaaggttacacagctaagaagctgcagaactaagatttggaggctggtttgattcttaagttcatattttttccctgctatcaggctgtgtccttcacaagacacctccaactgaatagatgtcagtgacccttcttttttcaaggcagttcactgaatcatttgtcccactgagggacactatccaggacaatccagtacctgaaggacttttctgctccttcttcctcatctgtggagaccatttcatacttgttcttccttcctaccctccatgtagatttagggctgagtttgcagacctgaggtttgtgttttgtcaataaagcaccaaaaatcattgaaagcttaggggaaggaatatcagtaagcaaataaggagacttggaatctggaataataataataataaatattcattattactattagccagctacttttccacatattagctcatacaatcctcacaagaatcccaggaagtcaatgctactaactacattttaaagccgaggcactttaatatatgatatgatgcaacttgcctgaagttggtggaactgagatttgaactagaaagaacgattctaacacctggtttcttaactactctgttagggcatcagtattttaaaaagcacttcctgggttgaatctgaagttcagccagaggtgaaaccccatgtgactcagttattccacttcctgtgcctcagtttcttcctctgaaagtgagagaagtgaggtttagaactgtgggggatatgtgagaagataaattgagatgcctattagcatttggtgggcaactttgagggatgctaaacatcaagggatgctgaggacttactgcctgaggaagaattttctcgcccaaattgccaataacatcccactgattacaagacaccctatggctctcaaaatctgtgcatgggtgattataaattctactgagtgctaaaggaggtggaactctttccttcaatactgaatggactattctactttaaacatttaaccagtaagctgtagaagagacaggcaagtctgcaggttgaccttctgctggtggagtgcctctgtgaccccggaaaaatgtgtcaccattctaggcctagggctcctcatgtttaaaatgggatttaaaagattcagtgggctcttcagagaattaaataaaaccatgtatgcaaatcactaaacgtagagatacttgctacataataaatacttataaacaatacacacatgatgaaattaatctcattttcctctttgggttaattagagaagaatctatgctaattcatgtaaagcatgatcaaagtaacataagcagtaattaaagatgcacactatgatgaagtctttcaattgtgtgcttactgtactcatggcagctctgcaacaatcttaatttcctatgttcttgttcaaatggaaaatcttgcataaggtaccactaatttctcccataataaatgtaaaagttttagtgtgtgtttattattgcattaaattaagataaagaataaatcaagtaaaaatcaaatatatgtatacttacatatgatagataactgtaatcccatgggaaaccccaccttccagcacacatatcctttctaagaaggaaacatcaccctaagaggatcctgtaattgcaggtcagggagaggaatgtgaagaggtctgagagtgaaagcactttttttgaaaagggatataaatgttaggggtacagggaaaaaaaaagcatggaaactgaagcagagttgctgttggggaatctggagataaggataagacagtaaatggttcattctcatctttccctgtctacccaatcctcagtaaaataatcatgtttttccttaagaccttgcagacatgaaactgttccttgaatttgttaaaggaaagtactggattctccttcaaattggttttgctgcaggaacaatgactgttcaagagttactacattcaaacaatgtaaagtttctgaattgttcatcacaacattgttagtgggagtttgggattagaaacaacccaatgcccatcgctgaggaatgggtaagccaaaatggaaaacatccatctggatgccatttagcaggaagaagcaacaaactatgttgtttaccagaaacagttggagaatataaaaacaaaatgatgttattaacatagtgccatttaagtaaatgtataacatgctcacagcaataaaaatactatgaattttacaagagtacataaaatttagagtttcatattcaacatattagaatagtggcctaagagtgtacagaagtagtaggatggatgaatggatggatggatggatagataaattttaaaaatcaaacaaaaatgacagactttgaatgggccaatgattatggaattggggaagatgattaactcaattttttatactaaaccacctcactcttcaaaacatttctgcagcaacccggaaatcgatagcagcagtaaaatcagccctgtagattttgccttgtttagggaccttgcaaaatcaatacaaattggtagaccactcctagtgaatttaagagctagtttcacagattttaaaaagttaaaatactatttaaaagctaatctgaaaaggctacataatatgtagttcaagcatatgacattccggaaaaggcaaagctatggaaagagtaaaaaggtcactggttgcccaggttctggggataggtgggtatggggagggagagataaataggtagagcatggaggattttttagggcagtgaaactattctgtatgatactataataatggatacatgtcattatactgttgtcaaaagccataaaacaaaatatatcacataaaattctaatataagctctgaactttagtaaataataataatgtatgggttggttcattaattgtaacaaattgaaccacagcaaaaaaaaaaatagcatttcaatgcaagacatgatataagagaacacaagggcacaaggaccagggagctacattaaactgaggctaagatgacaatcatgctgggagaagttgatatcatgtgcctccaagcagaccagagccaggctctgagcagaacatgttttctctaaagaaaaatgggataaataggtgcactgcttatataaactagaagtggttatgcaaatactcttacagggaaaaacatgtctactatcctttgcatattgcaaaataattttagcaactgcaggagtataggatagaaggggatgaggcatccattttattgatttattgattgactaaaattttctgtgaattttcaaagccaggagaagcacatctcaaagactgaggtagaagtgacttagctcttgcattataaactatatctctttaactttccattgctggatgtctttctcttcctttataaggggaactaaaagagctaattgatatagagttatttgaaagcagtgtgaaaatatgtatgtgtatatgttggtggtggcaaggtggaggtggaactgtatcattccattaagaagaatatgatatgaactaccttgacagctggtaaaggaagtggatatagaacaatggcctaaagaattatcctgaaacattatccaaggtcactgatttcaccagggactatcataaaacgcactcatgttgcaatcctttcctcaagctctttgacagagcagagtgtgtgtggggtcatacgatgactcttgataattagtcaaagagacagagccatgtttctacacaacttagcaggctctaaattcagcacagagcaaatggctttttccaactgacccatatagaaagaaagtctaatggaaaaaggctaaggaaacagagtgataatgtggtagaaaaaggcaaatgttggagtcacaatgatctgggctctaataccaattcaaacacttattagttacatggccttgggacagttagcaaatttgatgttgtctcaatttcatcatcagtaaaatgacagtgggaatatttacctttcagagttgttacaaatactcaaaacagtcaatataaatcacaatatctggaacacagtcagtactcaatgaaaatggacattatattaatagttacagtcagtgtttaagaaaagtgctaatctcccaacagcactgctgtaaaagagattatatagagttttccaaagtcctcaaaaggataaggatatctaatattattgtcctttttttgtcctaaaatgcacagagtggaaagcagccttcatggttatggaggaagatctctttcataatcttggtcccccatggtctgtatcatctccatcacaacagcaataacaaaagtgcctcttatgtgtttagtgctttacaaaaaaattgtctcattttctctgaccccctaattttcctggctctccaaacatggtactgaatggctcatttgctgcagctggtaattcagctcgtccctgggccttcatgcctgccttgctatggaatatgtaacgcattttcctggggaaacaaaggctgaaactggcagtcctaatgagttttctactctagggctgctattcctcagctcaatcaaggctacgtgaggcctggactgggaagcaaaccaccatcttgtttttataggggtggaattggtcctaactttgaatgaaatgacttgcaggaagatgactttggaacacactctgcaggtcagggtctctgtcattggtgggccaattgcctcacctctgacaaagcctgcacacatctatgggaatccctaatctattctatttgtctggggaggctgtcagtgggctcaaaggcaagggagttgggtctgcagtcacttccttatttccagaattgggaaaccaagtttgggcttccccactcactctcctgcttgcaataaatgctataagcctagtctttatggctgtatatgtttttaagttaatggaattagatcactcagtagaatccaggtgagttattttcatagtgtcagcagaagtattcatatgaccacagctgtggatgtatctgaacaagaagaaaggagtcatctggcaggaggcaaggacatgacctctgccaaaagtctctttctctaagttattaattttttattgcagttgtactcccagagttcttaatctcatgttttaaaacctctgaattcttccatttctctagtcaatataaaattggtaaagaattatatactttgggtatctaggtggcaagatctaacaggatctcattttttacttacaacaactttctgggaaaggtaatactattatagccactctgcagataaaagcatgtaaaactagagagacttgggagctcactcaaggttacccagctggcaagtgacagattcagaagctggatttagatttattagactccaaagctcctatctctaatcaataagctgcaattactcgatgctttctcatttttaaagtacatgattttgaaagtgtaggattgttatttaagccttctaccagtcttggaaggtaggcaggacagacactgttatctcaatttaatagcagagggcaggaggtttaggtgggtcaatgacacggcctaggtcaccaggtagcaattggcagtgaatggaatatggactctcagttaaacagacctggatctggggctgccccgatgttgtattcagctgcagatgtcacctatattctcagtgttctcatctgcaaagtggagctgttaacacctcccttatagaaaggttttgtgtgtgtgtgtgtgtgtgtgtgtgtgtgtgtgtgtgtgaaatagatagtttgggggcaatttaacatagtggttaaaagtgagcaccatggagtcagactgtttattttaaatagttctgtgactttgagaaagtcatttaatctaagtttttgtaaaaagggtataataatagtacttaatctgtggtgtccttgggaggtataaatgaaataacctatgcaaaataattagtaaggagaagggctcaataaatattagctgttattattagtaaagccacttacaacatgcctaataggtgataggcaatcaacaaatgctaacactctccactattgcctgcttccctgatctagaatgtgcacatcaggataatatcctccttgggtcaggagagacctccctgcccttgtgactttcacctgcttgaacgtgggactttgggaaccaagtaaatgaaggtgagagatgccattttcaaatttaataaacacacagccactcacagtgcatctctcattcccactggcaggttataggcagtcttttctcaattacttgtggctgattttaatgcaagaccagttttgtttttttttttttcattttgctctgcatgttcacttgtgggctcctcctgagtcccgaatgggatctgctcagagaatgtaagcccatattaatatcctgagcaaaacataattagaaagctaaatcagcggccacaagaatagtataatgctttccaaagctatatagtgagtgtggggaatgctgggctttatgctttttaaaagacattttcatttgcttcgaattattcatatcacctttattagtttagaaaatcaagaagatgggacgtctctcttgattccagtgcagaggttggcaatgtagggccagcagcccagcctagcccagcccatggcctgtttttgtatgtcaagtgttattgaaatatatccatgcccatttgtttacatatcgtgtatggttactcttgagctacagtggcagagctgagtagttgtgacagagaccagatggcccatggagctgaaaatatttactattttccgtgctagagaaaaagttcagtaatccctgttctggctagcctttagaacagaccaagaggtgttcttttctcactcaacactgatagctaccacctactcctaagaccagcaggtggccagggcttcacagaaatggatgcttggcttgtggaataacctagcaaatgaagataacacgcacgaaatcagggctccacggggccttcctttatcaccctgtgctcattgctcccatgggataggagcccagggaagatctgctggatcctgcagggtctggaggttgccttagagccaatctgattcttgtgacaggaaagctgctatgtcgttgggataatctccctgctgaatgtagcctgagtttcataactcgcaacctgtgtggcctgagttttacaaatatacttgggggttcactttacatcaactataaacaacaaagatggaggttgtttgacaattattagcgtgcctaagaattccctggagtacctgggaataatgcagattcctgaatacaccaagagactaccagttgaattgtattttttttaatttaaaaagtatgctggtttttgttgttgttgttgttgtcatttgctgaggatggtgctcctgcaagctgccagctgcctctttcccttctggtaggcttacatgacaagcattcttcctgtgtgatgtggacgtgtaatgccggccccggtgaaatcacaggatggggagggttacacgaagccatatgtatgcaagcaagttacaaactctaaagtgctgtgcacacacaaggggttttgatgatggcatgtcaatcataaggggctgcattccagattcacatcatccttggtggtgtgatcatgtccttcaagtccagtcttgacaaaataggctacctgttcagttttccttcatgctccagcaattcaaagcgttgtctctgcgggacatacctggtaaaataactgaccactgggtatttccaccttggagtcctccctgcacccccacactcaatgtgccccaaacccatatgaaattggctcttctccctccttattttcttgtttctcttgtgattggaggttattttgtgatattgatatatctcccttcccttctctgtatttttctctttcttccccctccatcatattttgttcttgctacagggaagaaaagcagaagtttgggtcttttgctgtgggaaagggaagactattttatgtagggtgaccaaggaagggtcccctgagtgaagaactttgaaggataaatctggagagcaggagaatgagtcatgaatataagaagaacagggtgctccaagccaaggagagggtaggtgccagaccctgagctggagcctgcttctcatttttttgggaagagaaaggaggtcaatatggctgagtaaaatgaggaaggagagatgtggtggatgatggggtcacagaaaccaaatcccctatagcctcaaagccatggtcaggactgtggcttttattttgagtgattcaggaaatgaaacttacattttgaaaagatcactctggctttgtgtttagaatcagaaccacctttgtaaagatctccctcttgctgtgtagagacaaaggcagaagccgacagcccaattatgaggctcgttcacagcctggcaagagatgacttgcttggacctggggcagatgtgcaggaggtgaggatggtgggattatggcaaagtactggatgtattttgaagggagagccagctttgaatgatgggttagatgtatgaaagaaagagaacaagattcagaacatgacaatttcaagatggtgacatcttaggagggaataggcttgaaggtgggctttgtttaagccatgttaagttggagatgtgcgttaacattcacatggagatagtgagtaggcaattcaacaaattagtttggagttcaaaggaaagatccacactaaagtcaagagtatactccacagtgttcagatcatatttggcagcctaagattggatgaatgtgctaagggagtgtacgtggacagagaagagtatactggacaactcctgtgtaagaagttggacagaaataagaaattaacataggaaactgggtaggggatggcttgttagaggggagtcctataagcaaagaaaatggttcaagtaaaataattcagcaatgtaaaatgccattgataggtcaaatgaaggctaagaaggggccattggctgtcatgtttgaccttgacaataattgtttcaatgtaagtgtggaaaccaaagcaggattggaagggctcaagagaggatgagaggagaggattgagaggcaccaagcacagacaactcaagagtagtttgctggaaagggtagagaaaaatgggacagtagctaaagacaaacatggcatcaaaaagattttctctgggaaaacattactatatgttgatgaaaatgatctggctgggaggaaaataattgtgatgctagagatggagtagaaattgctgaagcaaataccttgaagaggtgggaggggtgagttctagagcacaatgaaaggagcagagggaagcccttccttcagaaccaagaaattgaaccttctggatgtgggcaggagctgcccatttctctgtagtcccacaaactttttttttttttgagacagagtcttgctctgtcacccaggctgcagtgcaatggcatgatctcagctcactgcaaactctgcctctcaggttcaagtgattttcctgcctcagcctcccaagtagctggaattacaagtgcctgccaccatgcccggcttattttgtatttttagtagaggcagggtttcaccatgttggtcaggctggtctcgaactcctgacatcaagtacctcggccttccaaagtgctgggattacaggcgtgagccaccgtgcctggtccccatgaacattttgagagctgacaaagtagatccctacaaggaaggccaagatacattcccccacagaaccactcgatgcatgtgtaagtcgaccgtttgtgatctgtaattgcatgcatctctctgaaaaaatttagaactatgcctgttcaggttggttcttcctctgtttgcctgtctatggccactggcccatcttggctgtcccacagtccccacagccagacaccaagacacttccagatgggctgaatcctgcaaagaggacaggcccaggaagtcagcaaaggacattttaaaactatcactagaatttttcatcaaagttatgtaagtttgcagcttagttgacaatatgtgaattgaagaaaataccttttcctgactcttgccttttcctgactctgtagaaaggctctagcaaggtgttcagaaccactctttctatcagaatgggaagttcttgcatgtatagcagtgaaagagggatcccaacttagatattagatacactcccatacgagcattggagatgtaaacagaagaacccaagttcacaaaaaggaaggaactgtgaatgaggaaaggaaaggtgcaatccagagggtctgagggatgctattaaatgatgttgtatctggggacctaaggatatccctccctccaaatctatacatctatctatctatatctataaattgttatataatcattagggtttggtccaagcctcaatgtaataatctgataagctggtttgggaagcatgactagtaatggggattcttatttccctaagtatcaaataatctcagcctaaagtagactatgaggcctgctctgtataatcccccttctcccaattccccacaatactgccccaatacaaccacatattctagagctaactttaaatgtcagtgccagagaattccagaaggttttgtttaaaaaccatttattcaggccttactatatactaagcactcttctaaatgcttaaaacaccagagagttgcgtaagatccttgttttcaaggagtttacagattggaatagggcggggacacgtagcagacatataaacagataaagtgagcgtcacatggcaagagagagacttacagtctcaggcggtcgtgggagcacaaagaagaggtcccaaggccaggatgttgggagactgagggacagacatgtagggcacttaggaggctttctagagccagagatgaatctcccaggctgagcagacaaaggagagtgttgctggcagataatcatggggatgtcacagtaagtttggtgttcttggagcagaagcagcagctaggaagaaccaggattagggctgaagacatcaccctgggccatattccagggcagtctatgggaagagctttatctttgtctcttagtatttgttttctatctctgctgtaacaaatttactacaagcttaggatttaaaccacgtaaatttattatcttattcatctgtaagtcatatgctcagcacaggtctcacgggtctaaactcaagctctaggtaaggatttgtttccttgctcactggggctgttggcaggatccactgccttgcagttctaggacagagatcccccattttcttgctggctgtaagctgacatcccctgcttctagaggctgccacatttcttggactgtggttccctttctccatcttcaaaacaactaatcacaggttgaatgcctgttaagtcatatttctgtgagccatcttctgctactctcttctactcctgtgattagattgggctcacattatccaggataatctacctattttaaggtcggctgattagaaatctcaattccatctataaacttaattctccttttccatgtaacctaatatggtcttatgttctggggattaggacatctttaagaagccattatgctgccaagcacactacacatagtagagaaccatggaaatattttaagcagggttatagggaggatacatataggtattggtcagggaagattcatgtgctgacaatgtagaccatcttgtggggagagattacatttttgaatgcctattataatcatcagatgacatataagataggtctatattaatgcagtgacagctgaatgcaatagtgtgtctagcaagacccactgattggatagatgtagggaaggggggactataggagaaagaagttagagcatgatagctctagggaggatgggagctggcaatgagaagagttgttccatgagacagaatttggaagtgttaccaacagtagcctgaagcaggtctgccatgcctattacagagttgataagaacaaggcagtgcctggcttgaagaacataagatacttctcagtttatcaaaatagagacttgcattcaagggaataaaataaaaggtggcaaaagattaagcataggaatgaggtaagtcctcaataaaagcacaaggttagccctggactggaagcaagatagtcttgacccttaggaacctgactactaagttctatctccttaaagagcctttagcagcagcactttgacctaggaggcttggatggggctgagtttgtggtcaaagtcaagtggctgcagctgtaagaactggagggccatgggagcaaagtgcctgtctgttaaacctcctgctctcagtgagggtcacccagggaagattttgatagttgcttagaccccttgcctcctggccttctaccatctgtgtgctcctgaaatcaaatcacgactgtttggatttggggaagttgtctgtcctccctaatgggttgtaagaagatgcttcatatgacttcagaagacttgatatttaatgcttagtattcagagaattggtcagttgtgaaccggtgaatcctgtcattggtttgtccagcctttcaaggtatgctaatgtgccagtatagttgaattcatttattcatacattcatttacttaacagatatttcttgactacctcctatgtatgaggcattacacttttatcattaaagggtcattcctaatacagttctttttgttgttcagattaaccatattatgtaattccatgcaggatctggaaaatttataagctcctttcttatcaggctgtctaatgaacctgatttttgttcatataagctttaagaggttattttaaaagtgttggacttggagccaagaaactctgaatttgattatgaattggtaacttctcgcaaactgagagcctcagtcaaaaattattttagcctcagccataggtaaatcttggatgggaaaaccctcttggcaaatggttgtgaggcacaaatgaaatactattattgctattattatcaaatcaaagcagcacacagaatccgatttgaagctaaaccacactaggctgatagcccaaggcactttccattgctccttactttgctggcttctttggcttcagcctgtctgctgtcatgtataatatgttcccatcaggacaccgataccaaatggtcaattccaaggagaagtgtgtgtgtaagagtgaggatgagcattcctcatcctgcacaatgccagaaggaggtgtcatggaaagagcatcagcaaaggagtccagagcttgagacctagtgctgacttaaccttgggaaactgtgcctcaattttctaatctgcacaatgaaagataatgcctaattcatgaggttgccatgagaaggaagtaaaatgatgtatgtcaaaataatgaaatatacaatgtttagtagctattggacaaggtaggagttgctggagctgccagtccctaccacttctcagcttcaagcttcaacaagatatcacagcataaggattcatgagaataggtgcaacacactaccttcaacacactgcagccacctctgtttgctcactggagaaaggtggagtttgtctacaaaaaaatgtcccccaacgatgtctataatatgttagctttgatatgttctttactcctctcaaagtagatggtccactggtttaaaacactgtgatatgcctgtaatcccagcaccttgggaggctgaggcaggaggattacttgaggccaggagttcaacactagcctgagcagcatagtaagactcgtctctacaaattttaaaaaattatttactctgaagggtccttccttttttccttgtttcccttttctgtgagtgtcaacactttattttggtgtaaacacagggatctagaaagtatatggtatttgaaattttcttggttcctgagctaatctgtgtaaattcaaatatttaaagggtaggggggaagggagaaatagggagagatttgtttaagcttacaaaattaagctatataggaggaataaggtctagagttctttaccactataggatgactataggtaataataacatattacctagtttcaaatagctagaagaatgaatgttgttgaatgttctcaacaaagaaatgataaacatttgagatggtagatatgctaattaccctgatctgatcactatacatgtatgcaacatgactatgtaccctataaatatgtaaaatgtatgtcaattaaaattttttaaaaagcactcataaatgtataggtaataagacaggattttggtggaggtggccatgttaaactttgtgaatcttacaacgttccctgggataaaaaggaaattatttgccctaagaagttgaagggatgtttttggactgagactaataattattcaaaaaagtgaggttaacttgacagattcctgtctgctgaacagggagcctgcccttttctcacctccagagaagtcatttttcatcagaggagaaacctgtcacacctttgggctgccaagccataaatcttctttccaccaacttgctaatagtttttcttgccacctttcctgataatccagagtaattgttatgaaatatgggcttgttctgtctttcccagctgcggcctccctgtcctctgcaggtcctggggagaggcagaggctctgtgtttgtcactggctgttcgttagaagcacagcagatgctgttaccaaaaacgtgacatcccgatgaaactggaggcgccacacagcagccctgaaatatgagagccaatggccccttctgcccgaaacctatcagcaagtggcctctggtttatttagagcattctgtttcctggagagacagaaagaaaatgacccctgtttaatcacagggatgaaaacattctttcatgcatgcttttacttattccacagatatgtattgagcatctgaaattgttcggcagagtactgggttaagcttgaggaaaatgagcaattcaacatatacttgcatacttgtacatcttatagaagtcatagttaactgaaaggatattttctctgggaagagtatcaggagacattgagctgggggaattcagaaagtgtggcgttaagtctcccctgttccttatgaagaatatgctcagatcggtggctaggggattttgcctgcccaatacgagctcctgccagatcttggaaagccctgagaaagacttgccaagcctcttagactccctacatggaccctgaaatctcaacatggttaccttaatggttgcaaaactgcctttcaagtctcatgtccatgatacatatctgggatgagggtccaagttcttggtatgcacctacatgccatcttgctacattgcccacaagttctgtaacagtgactggacaccatagatgcacaattaccgtgtaactctgcaatgatagatgtcagtggacatgtacagttaattgtctacgaggcctaagcagtaccaattatggcagatgaatgcaaagcctcgaaaagcacctacaattgccatagtgctaatcactggagatataaagttgaagacaatccatgccccagaaactcaaataaaaaaggtttgtaaactgtaattgaccttaaaaaaagaaacatccttggcagatctagccctggtcttagttcatggatcccctggctaaacatgtacctcagtcttggccgctggctgcccagtaactgaacattggcaagttagggtctgataggattactttcacagttgcttgaacagtgatatctgcattctagctaaaacctaaccattaaattccaagtttcatagtttaatatagggagtgcattgagtcaagtgacacaacactaaataagttttgagtttcagatgtctatttctaagaaaatgccagtacttgaattaatcaactaaaattcatcaagctcctcccctatgccagccattgggccaatagctttatatgagttgtctcttttaattcacaaacctctgaagtaaatgctgtcattttctcccattttatagatgagaaaaacatgagttccaaggcagaactcaaggccaggatgtgtgtgccttgagcctcccaccctaattctcatgataaaacatttcctcatgcaagatttatttggctgtgttacacctttacttgatgaatgctgacacattctggcaggttgtggtacatgtacataatttattcagcagaatagtgggggccagagtgggagacacagatggcaggacacaaagataacattagcaaagaaatataaaaataatgatcagatatcactttgggtcaatttccctaccatctttcttatacaatgctattgaatagaatttgaaatgcaaatctcctttcttatccttgggatgaacaaagataagagtttttaaatttacagaaaagagtaggagaaataagatataaagtcagaattctacccaaaaatctcggttggttaaacatggtcgcattcttgcagctttcttacctttacaggtgatgtttttctttgtctggatcacccattttaccccttcctgcctttctcctccaggacaactccttctcattcttcaagattcagcctaagggtcacatcctccaaaaagccatccctaagtcctagacttaatcaaatggccctcctttgttttccctcgtcctcataggattataattgtttatgtgctttgctgcattgtacattggcctatgaactcctttaatatacaaaatgttttgctcctatttatatacttaacatgtaacagagtggcaaatatctcgtaggtgctgaatgaatgaatacattctgacactgaccaggtaggtttggtctgcttataaccagagtagtctacaagcttaaactcagttaccagtcacttgattgtagcacgacacacactcaccctcacaattgggaatggaactcatcatctaacagaaacttaaacctagaagggataacaaagacaagctagttcagtctttgctttatatagataaagaagcagaagccaaatggattgaagagctttccccaaggcctcccagatggtcaaggatagaactgggaatgaaacctaggatttctgactgctaagccagaagtctttgcactttgcaccagaattctctcctactggagggtccttcctagactgccccgtaaggacagcatgtccttcccaatggacactaaagagattcaaaaggtaatcaatgaaaagcaaatttattttctcacatattgttgaaaaaaactcacaaagtctctgatccctcatagtgctcaaccactggttctgaaacatgcttcaaaaactcagttattccagggtattgtttattttttgtcaaataattttgtgcacaaaagacatttaaagggccttgcagacagcatgttgtctttgaatggacagccaaggacatctgccataaggcaaattctcatttcagtcagaatgctgacttccaataaatctattcaaaggaataaagtggctgttctgccttttggtaaaatacactcacagctcactaagtattttgttgatagaatgttagcaagtagtgacagagagccaggcagcctgaagccagtgaaatgtagcataagatctacaagtcactaagaatttaaaactttgtttaggtggcactagtaagtctagtatggtcttcacaacacttcggtagagacagtactggtgcattggaaagaacaagggctgggaaagtggaaagatctgtttaagtccagctccatcatgtattacctctgtggcctccaacaagaggtttcatcctcttagtcccatccatccattcaagaaatatttaattagtatctatttagtgcaagctcttttctaggcactggatgggtagcagttaaaaaaaaaagagagagagagaaaactactctcatcaagcttacatatttataaagggagacatctgaagaaaaacaacacatgcacaaatagaaaatgcatgttattcagtgactagtattatggagaaaaatacagttggggaagagagagtgctgagaaaaaaacaattttattttattttattttatttatttatttatttattttgagatggagttttgctcttgtcacccaggctggagtgcaatggtgtgatctcagctcactgcaacctccgcctcccgcgttcaagcaattctcctgcctcagccttctgagtagctgagattacaggtgcctgtcaccacacctagctaatttttgtatttttagtagagatgggttttcaccatgttggccaggctggtctcaaatccctgacctcaggtgatccacccacctcggcctcccaaagtgctgggattacaggcatgagccacggcacctggccgaagaaaccaatttgaaataggatgattagggaaggtatcactgagaaagtaacattggaaagaaggttgaaggggtaaagaaatgaatcaggtaggtatatgggaataaagtgctccaggcagatagaaagcaagcttacaagccctggaggggcaggggtcagaagggagcatggtgtgttcaaagaccagcaagaagtctgtgtgtctagggcactataagtgatggggagagttaatagggaatgagctacaagagatttaagaggggaagcagagagctggaccttttaggggcttggaaactattaagaagacattggcatttgtttcctgagtgaaatgggaagctcctggagagttttgagcagaggagcggaatgatctggccccaggttttttttgtttgtttttgttttttttgacggagtctcactctgtcacccaggctggagtgcagtggcgcgatctcggcttcgggctcactgcaacccccgcctcccgggttcaagcagttctcctgcctcagcctcccaagtagctgggactatacgcgcacgccgccatgcctggctaatttttttgtatttagtagaaacgggggtttcaccttgttacccaggctggtcgcgaactcctgagctcagacaatccgcccgcctcggcctcccaaagtgctgggattacaggcatgaaccaccacgcccagcgatctggccccaggttttgaaagatcgcactatgttgagaatagtctgcaggagggaagtgatggaagcacacagaactggtaagaggctattgaaatgatccatgcaagagatcactgtggcttgaaccaggtaggcagccatggataaagtgagagggggcaaattctagatatacttagagatagtgccaccaggatttgttgatagactgcatgttgggtgtgagggaaagataagtcgataataacttcaaagtttttgacctgagccattggaaagaaggatttgtcattaactgagatgaagaaacctgagggaggaacaagtttgttgagaaaaacaggtgtttggtttttgatatctcaattttgaggtgcccagtaaacatctaagaggaaatactaattaggccactgggaccaccttgttgaagagagggctagactgtagatttaaacctgcctgtaaacgatttttaaagcaatgagagatgagatcactcagagaagagcagtcatgcaaggactatgacctcaggtgctcaatgttaagaggtgggtaatcaaaatagctgccgttcatgcagtgcttaccaggtgccaggctctgttctaagtgcttccatatattaattcatttactatcttcacggcaaccccataaggtaagaactatttattattcttatttgatagatgagacaactaggagaaagagattaagtaactttcctaagatcacctactgacttgcacagccaggatttcaacctaggctttctacctttagagtttgggcttttgactgctttctgacactcttctataactagaagagagatgctagcaacagaggagactgagaaaggacagctggtgagggagaaggaaaaacaggcaacgtggggttctgagagccaactgaagaaagtgtttcaaagaggaggggagggatcacctgtatcaaatgatgctggtaggtcaaaaaagatgaggattgacaatagaattctagaggtcatcaatgactttcacaaatgtacttcggttgatgggtggcagtaaaagtcagattagagtaagttcaagagagaaagggaatttaaacaatgatcttgactattcttgagagaatttttgaaatagaggggaatatctaaatgggcagaagctggaggtgaatataggatcagctgaagtttttattttttttaagaggagaacaaatagcataaacctgttgagaattatccagtagagaaggaaatattgatagggaaataaagatttaagaatattgctgcagtgatgtccttgagtagtcagaaggtttccttagatgaggaaagcaacaattcattgacagtaagtagaggaggcagagtctgcaggcacagatgctggtagttgggcaagtgtagtcatggaactttgtgaacattctcttctaattgcttcagttcctatgcctcaatttcctcatccataaaattggaattataatatccctctcccatggtggttgtgagcatttaataaggcaacatatgtaaaatgctggtgtgatgcctggtacaacttatgagctcaaattataggaattctttcatctttgtccttattggttattattattaccagaatttattgagcacttacaatgtagcagacactggtacaagtacttggtatacattcctcacaaaatggcatttccatggtgggtcttattaaggctctctaagctcttagaaggaactagtgtgtaacttagttgactgattacctcttcagttcttccctttgtatcttaaattcatttacaaatttacaaattcatttttaaagccatgagcgatgatatatcccttcatgtcacccccatgagagaagactttccaggaacttatctggttgaggtttctaacatttgttcattcaccctgattcattgagagagtagtgtccaggacacagaagcatactttccatctaacgtgctttgtgggattagatagggcacagtagactaggctaagctatttgccaaccctgggtctactttatgttggctccactggtagaaagtccttgaaactgggcaataggcatttttccaagggctggggcacaggacaagctttcttctgctgtttttggggtagtgggaggcaggagagaagtcagtaaagaccagaccctgaacatcaatgttctcagttgggaaaagagaagttaggatgagaatgccctagagatctactcaggcattaacactctgtattttttttttcatcacttgaacacactctctttcaagttttgaagtgaatacagatttctctactgagggtccccttgtcaaaaccggtcagtcatgagaaacccccagcctttctaaacaaggagcttccatgaaagtagattcccattctgtacttacgaggctgtttctaagagtaagcagcagaagtcagtgtcttcttcgtactgagcaatcttgatcaatctgtggttctgtttcccacaactgagaattggacatcccaggattcttacatgcttgagacctggaatttagggctgccccaaatatgtataagtgtcataacctgtttcctctgaggaagcagttaaggttcaaatggaccgttggaatgatcctggtattttataatacaactacaaggactttcattaagaaatgaggagtccccaaagtgaactgctgcagagtggtggatctttatatttcttatggggtgcctattatatgatatgcattgaatgctattatttatatatactatctcacttacttcttgcaaccctcctatggggtaagtattactatctctaatgtgcagatgaagaaagagattcagagaggacaaggactttgcccaaatacacacagctaagaagtgatagaactcacatttaaacctaagtccacttaaatttctataagccctggtctatttgaaagcctttaactttaaatggtattacctccttattgatttccacaatgttgaacatgtctgagggttgcagaatccttctatgacactatgcctatatggctttacctggagccattctggatgctataagttcataaataatgtctcttcaacttggttaggctcacagtgccaatgtagacagatgatctacggctttgtatggtatcattgttagctaatgtgttacttcatagtcttgggttgccatcccctggagtgttttgatgcgatcagttgtcagtttcaggtctgttgtttctctcaccagaagcccagccggtggaaactaacagccccaaagccctgcttgtgttaggggagctatcgaacacggataatgacataaacgagtcggtgttcatctggggaatctcagacaaagcagcccagaggaaaaccatctctgtcgatgaaggtttgtttcatttgcaacaggaaaagcagcagcaacagcagcagcagcagcgactggagcccgtgcacaggctgggaagaggtaaagggaggctgaggctgccgcatgtgagtagcattttgtgatttctttgcagctgggaaaggaatgctggggaggggtctcggctgtgaggtgggcatatgtgtgtgggttggggctggcagtaattaacaagtgcatttgaaatctgtcctcctcttccaaaggaggtacaggagtgtgcccacacgcacttgcattttctctgcagattataaaaaaaaaatcagcaggtgggacatattttcttttttttccttcttcttcagtctttaaagtgggctgcatggcagaaagacatcactgtccagaggagctttcccaggtgaaagaactccctagagggtttctttcccaagtttcttttgcagatgtgtggatctctatttctttgctatcaagcgccttaatgtggaggggcatttacatccctctagctgcaaaaagatgagggtgacttttgtatctctggttctcagctggagttgcctgtaataaacagcaccaaatccaatatgatttaacctctcagttgtcaatgttgaatgtgttcaaagaacacagtctgggcacggaaaagcatgagttgcattttacccatcctctcagcctggggaaaataacgaggtatttcaacattgacacctgttttgaactatgggaaagttttttcttttcctttcttttctttttttttaaattaagccctgaaatttgctatctgtgaacactggatagattgaagttgaaaggagacaggtaagaatgattttgctgtaaagcacttttgcagtgagcatcaggttgtcttagtataagacagtgctgtatacctttgggtaatggtcgttactaatgctaaataatgtgctgagcaaaagtgtgtctggtcataaagttgcctgtatcctggttatctggagacacaggatccccctccctgccctgcttctttctttccttaaaggctttgatgtttctcagcatgtcatgctgaatgtctagatatttgggaatctgcagtaaatgcatactagttcatctccaagagagggggaaagggggagaacgaaggagcacgggaggagcactctgcttatccttagagctggctttgagcagctgtgtgtaatgagggttgaagagtctgaggcactctgcactgggacttggccaggagtggcgtggttggctggatgcttgggtgcacaactgaatgctgttatgtgggagtcagggccccagctcccaagttgctatgggacataaaatgaaatatgaaccaggggatgggaactggggagaggaaagagccatctgtcttctacaaggtatcctttcactgaagcagttctccccacgcttcccctccctgcccccaccatgacacatgggggtaaacggagaaagctgttcaaatcaggtgataagtagcaagagggctcaggtggccatccaagtggacagggctcaatgctaggggtcagcaccatatctggacccttccatgacacagtggtgtgccttggcagacaggttgagaagacctaatttaagcaacccaggaaaagccaacaaaatagggcaatatgaataatctgatgcctgtgactctttattttttcccgttactattaatgcattgcagaaacgttacagtgtttttaaaggatcttctcctaatctcacccctttagcacctctgatttttccctgtgccatctcccaatctttgtccatgtatacatttttgacacggttgtaactgtggtttagatatttgtatttgttttgctttattccctagtattattccaaaatactttcccttattccagtacaactttcatagagattatcatctgtggttggattgaatgaattaatccctgatatggatatgctgtaatctgtttagcaattgttggatataattaaattgcttatagtttttttcataattataatgccacttatgaatatttctgtgcccaaagcatttttacttcctggggggatgaattcttaacattgatattactaagaaaatatgaatttttatggcttttcatgcctgttaccagactcttctctgaaacgtgtttctattttccaaaatcatcaataatatggtccagataaacaccaattatctagagcctgatgcacattagattctttatttttttctctccctaaattaggagctgtaaaattatactggcccccttttttaaaacttgctttgagtcctagtgagccaagcattcttgtcctcctcaggacaggcctgcagcttcccaggtgccttcactctgtccatgacaggcatgaggaaatcaagcatcaagctcagcagcctctcatttccatccctgtaaaggatgaagaaaggaaaggtagaagatctctatcctgtcccagggcacctgaaaatcatgagccagggtatgcaggaggggaagccagcctagttccaagccctagagctcaatcctggcagatgccttggggcctctgtcttccttccctcccctaacagagccagcatagagctaagcgcacttcttgggcaggatttgaagctgatgtctggcagagtgggtgtggggtttgggggaaggtgaagactagcaaaggtaatcaggggaaaaaaataacatgtcttatagtttccactgccctgtaatgatctcacaagtgcatgtgctttagtgatggaggccagacagggcgcaaggatttctgaatgtcaacccctatcaaatcagatttgtagaatacttctttttcagtttctacctgctgtggggacaattttttcaagtgttcttttattttctcctcctttgtgtcttatccatttggagattaatctgtgcttccctgacctcctaggtaactcacttataaattgcttcagtgattatctcttttattcattcgctaatgatttgtgcaaaggccaagaatgcccagtggcaaccacacagcagctcagcatgcatttgcccaccctgacctgcacaagtgggaaataacagtgtcttgggagcaagactttcctaccatatagaagcgggtttgataaatgatttttttttattatactttaagttttagggtacatgtgcacattgtgcaggttagttacatatgtatacatgtgccatgctggtgcgctgcacccactaactcgtcatctagcattaggtatatctcccaatgctatccctcccccttcccccgaccccaccacagtccccagagtgtgatattccccttcctgtgtccatgtgttctcatagttcaattcccacctatgagtgagaatatgcagtgtttggttttttgttcttgcgatagtttaccgagaatgatgatttccaatttcatccatgtccctacaaaggacatgaactcatcattttttatggctgcatagtattccatggtgtatatgtgccacattttcttaatccagtctatcattgttggacatttgggttggttccaagtctttgctattgtgaataatgccgcaataaacatacgtgtgcatgtgtctttatagcagcatgatttatagtcctttgggtatatacccagtaatgggatggctcggtcaaatggtatttctagttctagatttctgaggaatcgccacactgacttccacaatggttgaactagtttacaatcccaccaacagtgtaaaagtgttcctatttcttcacatcctctccagcacctgttgtttcctgactttttaatgattgccattctaactggtgtgagatggtatctcatagtggttttgatttgcatttctctggtggccagtgatgatgagcattttttcatgtgttttttggctgcataaatgtcttcttttgagaagtgtctgttcatgtccttcgcccactttttgatggggttgtttgtttttttcttgtaaatttgttggagttcattgtagattctggatattagccctttgtcagatgagtaggttgcggaaattttctcccattttgtaggttgcctgttcactctgatggtagtttcttttgctgtgcagaagctctttagtttaattagatcccatttgtcaattttgtcttttgttgccattgcttttggtgttttggacatgaagtccttgcccatgcctatgtcctgaatggtaatgcctaggttttcttctagggtttttatggttttaggtctaacgtttaaatctttaatccatcttgaattgatttttgtataaggtgtaaggaagggatccagtttcagcttcctacgtatggctagccagttttcccagcaccatttattaaatagggaatcctttccccattgcttgtttttctcaggtttgtcaaagatcagatagttgtagatatgcggcgttatttctgagggctctgttctgttccattgatctatatctctgttttggtaccatcagagaatactacaaacacctctacgcaaataaactagaaaatctagaagaaatggataaattcctcgacacatacactctcccaagactaaaccaggaagaagttgaacctctgaatagaccaataacaggagctgaaattgtggcaataatcaatagtttaccaaccaaaaagagtccaggaccagatggattcacagccgaattctaccagaggtacaaggaggaactggtaccattccttctgaaactattccaatcaatagaaaaagagggaatcctccctaactcattttatgaggccagcatcattctgataccaaagccgggcagagacacaaccaaaaaagagaattttagaccaatatccttgatgaacattgatgcaaaaatcctcaataaaatactggcaaaccaaatccagcagcacatcaaaaagcttatccaccatgatcaagtgggcttcatccctgggatgcaaggctggttcaatatacgcaaatcaataaatgtaatccagcatataaacagaaccaaagacaaaaaccacatgattatctcaatagatgcagaaaaagcctttgacaaaattcaacaacccttcatgctaaaaactctcaataaattaggtattgatgggacatatctcaaaataataagagctatctatgacaaacccacagccaatatcatactgaatgggcaaaaactggaagcattccctttgaaaactggcacaagacagggatgccctctctcaccactcctattcaacatagtgttggaaattctggccagggcaattaggcaggagaaggaaataaagggtattcaattaggaaaagaggaagtcaaattgtccctgtttgcagatgacatgactgtatatctagaaaacctcattgtctcagcccaaaatctccttaagctgataagcaacttcagcaaagtctcaggatacaaaatcaatgtacaaaaatcacaagcattcttatacaccaacaacagactaacagagagccaaatcatgagtgaattcccattcacaattgcttcaaagagaataaaatacctaggaatccaacttacaagggatgtgaaggacctcttcaaggagaactacaaaccactgctcaaagaaataaaagaggatacaaacaaatggaagaacattccatgctcatgggtaggaagaatcaatatcgtgaaaatggccatactgcccaaggtaatttacagattcaatgccatccccatcaagctcccaatgactttcttcacagaattggaaaaaactactttaaagttcatatggaaccaaaaaagagcccgcattgccaagtcaatcctaagccagaagaacaaagctggaggaatcacactacctgacttcaaactatactacaaggctacagtaaccaaaacagcatggtactggtaccaaaacagagatatagataaatgattttttttagaagctttactgactttttcagtctgcgagggcttattagaagaagcactgctttacaaaactggggagctactggaagctggactctgatctgagtgtgatttccagtggaagtggtggggcagtggttcaggaaggaaaggaagcctaggatggacagaccaggagaaatggcatgcccgtggcctgcagaaaagaataaagctttggtccactaaggagaagataagaggcttttaaatggtagtatttaagaaagacattaggaggactttctaaatgataacacttctcaatctttagtgtattattggtttaaggtctagattttctgcaaaattatattcaggagggcaagtgtggtttctgctttattcactgcatgcattcccatctctcacctaataatgacagcttccacttagggcttgctgtgtgtgttggccatgctttaagtgttctagctacattgtttcatgtcatcctctcaacaaccctatgtggtgtgcactattattatttccctcttacaggtttaaaaattgagaaacaaggaagttataccagagagtagatggggtctcacgtatgccagccagcagataagaaggcattgcagaagagaaaagggtctcatgccacttgaaagttgtaggaccacaatttgagcccaaacagtctagctccagagtctgcattcttaatcactggaccgtcaactcatttaacatgggatgagggaatgataaaaaatgtaaaagagcattgaaacactactgtgtagctaaaatgtactagtaataataataataacagtaatgatgatgagatcacaatagtgactaatgctatttactatgtaccggatactttttgtaggggctttgagcatatattattttactttttttatttctaatatttgtgggtacataggaagtgtatgtatctgtggggaacatgagatattttgatataggcataaaatttgtaataatcacatcaggataaatggggcatccatcacctcatgcctttatcccccaccccacctcactacccttcccagcctctggtaactatccttccactgtctatctccatgagttcaactgttttaatttttagcacccacaagtgtaaatgagagcatacaaagtttgtctttctgtgcctggctcattccacttaacataatcacaacttcatttctctccatgacattgcaaatgacaggatctcattcccttttatggctaaatagtactccattgtgtatatatactacattttctttcccattcatctattgatggacacttaggttgcttctaagtcttggctattgtgaacagagctgcaaaaaacatgggagtgcagatatcttgaatgtactgatttcttttctttgggttatatacccagcagtgggattgttggattttatggtagctgtatttttagttttttttgaggaaactccgaactgttcttcacagtgatcgtactcatttacattcccagcaacagtgcatgtaggttcccttttctccacatcttcaccagcatttgatgttggtttttaatcaatttccttaattaatgaggaaaaaaggtattttttaaaaaaattatttcaatcacttttggagtacaagtggttgagttctatagtggtgaattctgagattttagtgcgcctgccatccaagtaatgtacgttgtacctaatgtgtagttttttatccctagccattcttcctccctccctcttctgattctctgaagtccgttatatcactccatattaaaaagtcaacaaaaaatagatgttggcttggatgtggggaaaagggaatgcttttacgctgttggtgggaatgtaaattagtacaacctctatggaaaaacagtatggagattcctcaaagagctgaaagtagatctaccatttgatccagcaatcccactactgggtatgtacccaaaggaaaataattcattatatgaaaaggacacttaaacatgtgcatgaatttttatttaatcctcacaacagccatgaaaaatagccaccatccatatctcttatttcaccaagaaactcactcaggttttgagatgttttgcaacttgtcctgggtcgtagagctagtgagtctgaccctgatgcctgttacaggcatgtctcagagacattgcgggtttggtttcagaccaccaaaataaagtggatgttgcaataacaaaattcacatgattttttggttttccagtgcctataaaagttatatttaaactattctgtagtctattaagtttacaatagcattatgtctaaaaaaaatcaatgtatatacctgaatttaaaaatacttaattgcagactgagcatggtggctcacacctgtaatcctagcacttttggagtctgaggcgggtggatcacttgagtctaggggttcaagaccagcctgggcaacaaaaaataaacaaattagccagactaatacaagaattagtcccggctactcaggaggctgaggtgggaggatcacttgagcctgggaggttgaggctgcagtgaggtgtgatcacaccattgcactccagcctgggtgacagagcaagaccctgtctcaaaaacaataaaaataaaaataagtaaatacaaataaaaaacttaaattgctaaagaatacaaatgctcatctgagccttcagggagtcataacatttttgttcatcgttgatggctgctgactgatcagggtggtggttgttgaaggttgaggtgactgtggcaatttccttttttttttttcctctgattttctttgattcagggggtgcatgtggttgtttattacatggatatattgcatactggtggggatttggcttctaatgtacccattacccaaatagtaaacattgtacctgataggtagtttttcaacccttgcccacctcccgttctcctcccttttggagtccctagtggtgttcattatctccatctttatgtccatgtgtacccattgtttagttcccacttataagtgtgaacatatgagatatttggttttctgtttctgagttagttcacttaggataatggccttcagcttcattcatgttgctgcaaaggacatgatttcattctgttttgtggttgtatattatcccattatgtctgtgtgtgtgtgtgtgtattattccattatgtctgtgtgtatatatatatgtgtgtgtgtatgtatgtctgtgtgtgtgtgtgtgtatgcctaatgtggtatatgtgtgtgtgtggtatatatacatatatatatatatatatatatgtatatatacacatttttttatccagtcaatcactgatggagacgtactcaggttggtttcatgactttgctgttgtgaataatgctgcaatgaacatatgagtacaggtgtctttttatatattgatttctctttctttgggtagatactcaatagttagattgctgggttgaatggtagttctatttttagttctttgagaaatctctatactgttttccatagaggttgaaataatttatattcccaccagcaatgtataagcattcccttttctccatatccacatcaacatctgtagcttttagactttttaataatagccattctgactagcataagatatctcattgtggttttaatttgtgtttctctgacaattattgatgttgagaattttttcatgtttttttttcttttgctgcttatatttcctcttttgaaaaatatcagttcatgttctttgcccagtttttaatgtttttcttttttcttgttgagttgtttgagttccttgtagattctggatatattagtcctttgtcagaagcataatttgcaaatattttcttccattctgttggttggttgtttactcagttgattcttttcttttgctgtgcagactctttttattttaattaagtcccatactgctaaaaatactctacagattaacacaatctttgtcaaattactaatgtcatttcttatagaattagaaaaaacaattttaaagttcacgtgaaaccaaaaaagaccctgaatagtcaaaacaattctaagcaaaaaaaaaaaaaagccagagggattgcattgcctgacttcaaattatactacaaggctgcagtgactgaaacaacatggttctgatataaaaatagacacatagatcaatgggacagaatagagaacccaaatataaagcccagtgcctacaatcaactgatctttgacaaagctgacaaaaataagcaatggagataggacagtctattcaataaatggtgctgggaaaactggctagacatatgcagaagaatgaaactggacccctatcccttaccatatataaataattaactcaagatgaattaagacttaaatgtaagacctgaaactataaaaatcctagaagaaaactaggaaaaactcttctggacatttgcctaggcaaagaatttatgatgaagactccaaaagcaaatgcaacaaaaatgaaaatagataaattggcaattttaaaaaataacagtgaagtttgctgcattgtttgactttgactctctttcgcaaaatatttctctgtagcatattttgtttaatggcattttgtccacagcagaacttctgtcataatttgaatcaattatctcaaaccctgctactgctttatcaacccaagtttatgtattttcaaaatcctttgttgtcatctcaacagtgttcacagcatcttcactaggagtaaattccatctaaagaaaccactttctttgctcatgcataagaaacaactcctcatctactcaagatttatcatgagattgcagcaattcagtcacacctttaggttccacttctaattctagttctcttgttctttccaccacatttgcagttacttcctccactgaaggcttggatccctcaaagtcaaccatgaagaatgcaatcaacttcttcaaaactcctgttaatgatacttttaccttcccccatgaatcacaagtgttcttaatggcatctagaatggggaatcctttccagaagacttttgatttagtttgtcaagctccatcagcagcgatatacttaagaagtatatttcttaaatactaagacttgaaggctgggcacagtatatacagcagcgatagacttaagtatatttcttaaatagtaagacttgaaggctgggcacagtggctcacgcctgtaatcccagcactttgagaggcagaggcgggcagatcacttgaggtcagaagttcgagaccaacctggccaacatggtcaaaaccagtctctactaaaagtacaaaaattagccgggtctcatgccacacacctgcagtcccacctacttgagaggctgaggcaggagaatcacttgaacccaggaggcggaggttgcagtgagccaagattgtgccactgccctcagcctgggcaacagagtgaaactctgtctcaaaaaaaaaaaatgtgttgaaataactgcttgatccatgggctgcagaatgggtgttatgttagaaggcatgaaaatgacattaatttccttctagatctccatcggagatcatcttcttctccatcggagctcttcagtaactagatgcattgtcaatgagcagtaatattttgaaataaatctgtttttctgagcagtacttttcaacaatggatttaaaatatttagtacaccatgccgtacacagatgtgctgtctgtcatttaggcattattttacattatttgcatagcacagagtagatttagcataatttttaaaggccctagggtatttggaatggtaaatgaacaatggcttcaacttaaagtcaccagctgcattggtctctaacaagagagccagtctgtcctttgaagctttgaagccaagcattgacttctcctctctaactatgaaagtcctagatgttaccttcttccaatagaaggctgtttcatctgcatggaaaatctgttgtttttagtgtcgccaccttcatgaataatcttagctagatcctctggaaacatttctgcagcttctacatcagcacttgctgcttcaccttgcacttttatgttacaaaggcagcttctttccttaaacctcatgaaccaacctctgctagcttccagcttttcttttttactttaagttccaggatacatgtgcagaacatgcaggtttgttacataaataaacttgtgccatggtggttcactgtgcctattgacccatcctctaagttccctccccttgccccctaccccccaaaaggccctgctgtgtgttgttccgctccgtgtccaagtgttctcattgttcaactcacacttataagtgaaaccatacagtgtttggttctctgttcctgtgttagtttgctgaggatgatgccttccagcttcatccacgtccctgcaaaggacatgatctcattcacttttatggctgtgcagtattccatggtgtatatgtaccacattttctttacccagtctatcattgatgggcatttgggttggttccatgactttgctattgtaaatagtgctgcaataagcatatgtgtgcatgtgtctttatagtagaatgatttataaccctttgggtataaaccaagtaatgggattgctgggtcaaatggtatttctggttctagatccttgaggagtcaccatactatcttccacaatggttgaactaatttacattcccaccaacagtgtaacagggttcctatttccccacagcctcaccagcatctattggttcttgactttttaataatctccattctgactggcctgaggtggtatcccattgtggttttgatttgcatttttctaatgatcagtgatgttgagctttttttcatatgttttttggccatgtaaatgtcttctttgagaagtctctgttcatatactttgcccactttttttgaggggttgtttttttcttgtaaatttgtttaagttccttgtaaattctggatattagacctttgtcagatgggcagcttgcaaaaatgttctcccattctgtaggttgcctatttactctgatgctagtttcttttgctgtgcagaagctgtttagtttaattagatcccatttgtcaattttggcttttgttgcaattgcttttgatgttttttgtcatgaagtctttgcctatgcctatgtcctgaatggtattgcctaggttttcttctagggtttttatggtttggggtttttacatttaagtctttattccatcttgagttaacttttgtataaggtgtaaggaagggatccagtttcagtttttggcatatggctagccagttttcccagcaccatttattgaataggagatcctttccctattgcttgtttttgtcaggtttgttgaagatcacatgttgtagatgtgtggttttctgaggtctctattttgttccattgttctatatgtctattttggtaacagtactatgctgttttgcttactgtagccttgtagtatagtttgatgtcaggtagcatgatgcctccagctttgttctttttgcttagaattgtcttggatatacaggttcttctttgacttcatatgaaatttgaagtgttttttttctaattctgtgaagaatgtcaatggtagtttgataggaatagcattgaatctataaattactttgggcagtatggccattttcataatattgattcttcctatccatgaggatggaatgtttttccatttgtttgtgtcctctcttatttccttgagaagtggtttgtagttctccttgaagaggtccttcacattccttgttagctgtattcctaggtattttattctttttgtagcaattgtgaatgggagttcattcatgatttggctctctgcttgtctatttttggtgtaaaggaacacttgtgatttttgcacattgactttgtatcctgtgactttgctgaaattgcttctcagtttaaggagttttggggctgagattataaggttttctaaatataaaatcatgtcatctgcaaacagagacaacttgacttcctctcttcctgtttgaatgccctttatgtatttcttttgcctgattgccctggccagaacttccaatactatgttgaataggagtggcgagagaggggatccttttcttgtaccagttttcaaaaagaatgcttccagcttttgcccatttcatatgatagtggctgtgggtttgtcataaatagctcttattattttgagatattttccatcaatacctagtttattgcgtgtttctaacatgaagggatgttgaattttatcaaaggccttttctacatctgttgagataatcatgtgggttttgtctttggttctgtttatgtgatggattacatttattgatttgtgtatgttgaaccagctttgcatcacagggatgaagccaacttgatcgtggtgtatatttctttgatgtgctactggattcagtttgccagtattttacagaggattttcacatcgatgttcaacagggatattggcctgaagttttcttttttagttgtgtctcctccaggttttggtatcaggataattctggcttcatcataaaatgagttagggaggagtccctctttttcaactgtttggaatagtttcagaaggaatggtaccagctcctttttgtacctctagaaggatttggctgtgaatctgtctggtcctgggctttttttggttggtaggctattaattactgccttagttccataacttgttattggtctattcagggattcaacttcttcctggtttagtcttgggagggtgtatgtgtccaggaattttatgcatgtctttagattttctagtttatttgcatagaggtatgtatagcattctctgatttctctgatggtagtttttctttttttttttttttttttttttgagatggagtttcactcttgtcacccaggctggagtgcagtggcatgatattggctcactgcaacttctgcctcccaggttcaaatgattctcctgcctcagcctcctgagtagctgggattacaggtgcctgccaccatgcccagctaattttttgtatttttagtagagacagtgtttctccatgttgggcaggctgttctcgaactcctgacctcaggtgatctgcccaccttggcctcccaaagtgctgggattacaggcatgagccaccacacccagccggtagtttgtatttctatggggtcagtggtgacatccccttcatcattttttattgtgtgtatttaattcttctctcttttcttctttattagtctagctagcaatctatctattttgttaaattgttcaaaaaacacctcctggatttatgatttttggagggtttttcatactctatctccttcagttctgctctgatcttagctagcttttggatagtttgctcttgcctctctagctcttagagatgttagggtgttgatttgagatctttctagctttctgatgtgagcatttagtgctgtaagtttccctcaacactgctttagctatgtcccagaggttctggtacattgcctctttgttctcattgtttcaaagagcttcttgatttctgccttcatttcattatttacccaggagtcatttaggagcatgttattcaatttccatgtagttgtgtggttttgagtgagtttcttaatcctgagttctaatttgattgcagtgtggcctgagagactgtttgttatgatttcagttcttttgcatttgctgaggagtgttttacttccaattatgtggtccattttagaaaaagtgccacgtaacattaagaagaacatatattctgttgatttggagtggagagttccgtagatgtccattaggtccacttgatccaaagctgagttcaagtcccaaatatccttgctaattttctctctcattgatctgtctaatattgacagtggggtgttaaagcctcccactattattgtgtaggagtctaagtctctttgtaggtctctaaaaacttgttttatgactctgggtgctcctgtattaggtgcatatatatttagaatagttagcccttcttgttgaattgttccctttaccattatgtagtgcccttctttgtcttttctgatcttggttggttcaaagtcttttttgtcagagactaggattgtaatctctgcttttttttttttttctttccatttgcttggtaaattttcctccatccctttattttgagcctatgagtgtttttgcacacatagatgggtctcttgaatacagtgcaccaatgggtcttgactctatccaatttgccagtctgtgtcttttaattggggcatttagcccatttacatttaaggttaagtgtgaatttggtcctgtcatcatgatgctatctggttattttgcacactagttgatgcagtttcttcatagtgtcattgattttttattttggtgtgtttttgcagtggctggtactggtttttcctttctatatttagtgcttctttcaggagctcttgcaaggcaggcctggtggtaaagaaatccctcagcatttgcttgtctggaaagaaatttatttctccttcgcttatgaagcttagtttggctgggtatgaaattctcagaggaaaattcttttctttaagaacgttgaatattgtcccccaatctcttctggcttgtagagtttctgctgagaggtccactgttagtctgatgggcttccctttttaggtgacgtggcctttctctcaggctgcccttaatatttttctcaggctgcccttaacatttttcccttcatttcaaccttagagaatccgaagattatatgtcttgggattgatcttcttatagtgtatcttagtggtgttctctgtatttcctgaatgtgcatattggcctgtcttgttagattggggaagttctcctggataatatcctgaaatgtgttttccagcttgtttccattcttcccatttcctcgtactccaatcaatcataggtttggtctttttatgaaatctcttatttcttggtggctttgttcattccttttcattccttttttctctagtcttgtctgtatgccttatttcagcaaggtggtctttaaaactctgatatcctttcttctgcttggtcgatttggctattgatacttgtgtatgcttcacaaagtacttgtgctgtttttcagctccatcaggtcatttatgttcctctctaaaatggttactgtagttagcagttcctctaaccttttatcaaggttcttagcttctttgcattgggttagaacatgctcctttagctcagcatggttttgtattactcatcttctgaagcctacttctgtcaattcatccatctcattctccatccagttctgtgctcttgctggagagagatcgtgatcatttagaggagaaaaggcactctggccttttgagttttcagcatttttttcttatcttcatgagtttgtttagtttcgatctttgaggctgctgacccttggatagagatttgtgggtgattttgttgttgttgatgatgctgttgttgttgctttctgtttacttttctttcaatggccaggtccctcttctgtagggctgctgcagtttgttgggggttcacttcaggccctattcatctggttcactctcatacctggagatgtcattgaaggaggctggagaacagcaaagatgggtgcgtactccttcttctgggatctctgaccaacctgatgccagtagaatcacttccgtataagatgtctgacaacccctgttggagggtctcacccagttgggtggcatggggagtaggacccacttaatgaagcactttgtcccttgatggaaggggtgtgctgtgctgggggaaaacccactcgtctgggctgcccatattcctctgtactaacaggaggaaaggctaagtgtgctggtctgcggagactgcggccaccactcccgctaggggctcaggcccagggacatctgggttctgtccctgagcctctggctggagttatcggagtccctgcagggaagccctgcccagtgaggaaggatgagccagggtcaggcctgaagaggcactctggccgcagtctgccactgctggtatgttgggctgtgggaccagcatcttgagaccaagccgtccaggccccctggctccagcaggggaaaagcacagcctggagctatagcaatagatgccacctttcccccacccaggcagcttagcatgttaggcatttgtgactccaagtactggctgctgcctctcccctaaggagctcaaatggcttagacagcaggcagccgcagctgtggtgcttgttgcccctccccccaggagctaagtaggcttaagcagattccagctgagaggatgttgagactctgtgcggctccagggttgggatgctaggccccggtggtgtggattcacgaatgggatcttccaatctgtgggtcgcacaattctgtggaaaaagcatggtttccccacctaggtagcacattcactcaccaccttccttggcaggggtgggggctcccctgcccgtgggactctcaggtgggtcactgcaccatactgttcttccttcctcgccgtggatcacagcagctgcctagtcagttctgaggagagaacctggatgccttcattggtggtgaaggatcctcatgcttattatggttcttttcaatgggagcctcagattgctgctgtttctagtcgaccatcttggccctgcacctcattgtcttatctatgctattgcttccatcttttctcctgaagcttcttcacctctctcagccttcacagaattgaagagagttagggccttgctctagacaaggctttggcctaagggaatgttgtcgctggttttatcttctattcagatgagtatgactttctccatatcagcagtaaggctgtttggcattcttatcattcatgtgctcataggagtaacactttttatctcctttaagaacttttcttttacattcacaacttgtcttgcagcttggcacgagaacttagcttttggcctatctcagcctctgagatgcctttctcgctaagtttgatcatttctagcttttgatttaaagtgagaaaattgccattcttcctttatttgaacacttagaagctgttttggggttactaattggcctaatttcaatattgttgtgtctcagggaataagaaggcccaaagagaggaagagagatgggggaatggttggtggagcagtcagaacacacacatttgccatttaagttatctgtctcatatagtgatggttcatggcaccccaaaacaataagaatagaaacatcacagatcactgattgtaggtcaccataacagatacagtaataacgaaaaagtttgaaatattctgagagttactaaaatgtggcacagagacacaaagtgagcacatgctgtttaaaaaatggccccaatagacttactcactgcagaattgccacaagccttcaatttatagaaaataaaatatctgcaaagctcaataaagtgaagcaacaaaattaggtatgcctatgcctatgaccacaccttgatgacataccaacaggttagagctagaacaaaggccagaacagcaacaacaaaggattacctgagacattggaggtggctcagtggcctcttctgatctcttttggcttagagttctgtgatggcttttagatcacccatgcatggtgctacacaaaacacttagatcacctcccattcctggtagtgctcaaaggcaagttcctaaaggaagaaggcttggagaaatatcaccattggggaagtcaatgtacacttataagagaaagaagaaccccagctgagccaccacctctgttcagtgctcggtacctatgctgtctaatatgctagccattagccacaggtggctgctgagcatttgtaatgtggccagtccaaattgagatgtgctataaatgtgcatatacataccagaattcaataacttagtataaaaaagtagactatctgaatagatttgcattgattgcgtattgaggcaaaactattttacatataatggattagataaaatatattattaaaattaattttacctatttatttttacttttgaaaaaattttggtgaaatatgcataacatgacgtgtatcatcttaaccatttttaggttaaggttcaatagtgttaagtacattcaccgattgctgtgcaaccaatctccagaactgttttcttcttacaaactctgtacccattaaacaacttcttcccctccccatagcccctggaaaccaccattctactttcttgctctgaatttcactactctacatgcctcatatgagtggaatcatattgtctttttgtaattgacttatttcacttcataacattgtcaaggttcatccatgttgtaacgtgtgtcaaaaagtttccttcctaggccaggtgtggtggctcacacctgtaatcccagcactttgggaggccaaggctggcagaccacctgaggtcaggagatcaagaccatcctggctaacatagtgaaactccatctctactaaaaacacaagaaaaattagccaggtggagagtgcctgtagtcctggccactcaggaggctgaggcaggagaatcagcagaacccgggaggcagaggttgcagtgagccgagattgcaccactgcactccagcctgggcaacagagtgagactccatctaaaaaaaaaagtttccttcctttgtaagtctgaatagtactccattatatatatataccacattttgtttatcaatttatccatccgtggacacttggactgcttccacctctttttcctttcttgactgtgtttattacaatatttaaaattatatgagtacttcatatttgtggtttacattttatctctattgaacagtgctgctctgaacttttctgccttcctcggtgccttctttatctcatggcctctctttctcactcccatacatgaagcctcaactacccttcaccaggtgttagtttggcctctctccttccccttccctaagacctaagtcaagaatctcagctctgatcaaccactaagattataaggatctatgaaaggctgtcacatttagctaagtgtttttgtaattagatgaaactgtgacatttctcaagaggaatgttaccttttcttccttaatgcataagtagaagacccaataaattgggactgagaaggaaaagcttttgaagtaatttgattttttaaaaagtcaacagctttcctcagcttaccagctgcgagtaaattttattaactacgaggcagggaagagtgcaaaaaccaataaagcataaattcagagcagagatcgacaccagcttctcatttctggaatacagttttcctggaaagacctgggcatctagagatgcaaggcattggaatgtcatcagtgtctttggaatttctcgtcacttccagaataaaaccccaaagccttagcctatcatctaaggcctttctgcttgtcagtttccttttctgccactccctgcagacctctctatgtgaagacaagtattccttattactgcccaaatatgcggtgcactcctgggcttcccagccttcatacttcttttaaccttggcctgggagaccccatcccacctgtatgcatctgggaaactttacccattcatcaggacgtagttcaaaggtcacccctctgtgaagcatcccttgaccccagtatccatcagggtcccagcaggaaatagatgtcacactccaatgagtggttaaagggagttgaatgatggaactatttacaaaggtgtgggccgtgttaagagaaattgagatgagaaggtgaagcagcctaaggctgctgctggaagctggaagaaggaaggagttgctgggacatggccagattcataagagtgctctaggtagagcagtggctgcacctagtgtggcagaaaaagagatgtccctcttacatcttctcatgtctttccattgtctcccactgactgagctatctgaaaggcaaatggcatgagtgcccatagagctcaccagccccagggcacacagcaggtggaagaaggtagtgaaagatttagagggcaagcagaaactgtccagcacaattccacaaactctttctccagaaacactcccttctcaagactccttagcagcaccgtttacattgcaggataatctttttcatattgtattcatatcgttcaatgaaatgccttttccccaactacacatgagacaatgagttctttgaaggtcacactccttcctctcattcatacacatatttctaacacctggcaaaatacctggtagagagtaggtgttaaatacagacagagtaaatgaatgtattcctttatcacgtatgtatttctaaaaccctctttgaaatctacatgatgtatgttgattctagaatgggaatttctcaatgaattagatatatagaattaatgtccccctcctatgaatctcagctagggagttaaaatgattcaaatgaaagattattagtgcctcattattgtgtaattggtggcacattaagtcatgaggaattgaggaaatggaacttaagtggaaggaattagcagtaatttaggccaaccatgaaaatgtttgtgtgggtgctcacaaagaacaatactgttgtttgaataaaaactggggagcagaagtttcatatataataaaactttttcctggcctgtttaattggatttttcatataaacctatgtggcaagaagagagagaccagagggtttaatgctttgtatctaaagtgatggggatggagtgtctggggtacagcgcgaaatgccagttaaaacagtgaaaagcaaaggctgacctgagactggaccttgaccatgaagagtacatttaagggagaggttgacacaggcacgagtattccaggaacaaggtttcactgtgacaactggacattcctcctaagcaaaccactgaatgaggttatatctctgaagtatgttggtgcatcttggtttgctccctctactaggtcaatttttgaactggagtttggagggtatgtttgtttcctggggctgccataagaaattaccacaaactaggtggcttagaaaacagaaatttattctcccacgatctaaaggccagaatcctgaaatgaaggtgttattggaaagggacctggatccagatcccaggagagggttcttggatctcccacaagaaaaaattcagggcgagtccatacagtaaagtgaaagcaagtttattaggaaagtaaaggaacaaaagaatggctactccatagacagagcagcccctagggctgctggttggtcatttttatggttatttcttgattatatgctacataaggggtaaattattcatgtctccccttttgagaccatatagggtaacttcctgacattgccatggcatttgtaaactgtcatggtgctgatgggagtatagtagtgaggacaactagaggtcactctcttgcccatcttggttttggtgggattttgccagcttctttactacaacctgttttatcagcaaggtctttatgacctgtatcttgtgcccacctcctatctcattatgtgacttagaatgccttaaccatctgggaatgcagcccagtaggtctccgcctcattttacctcacccctactcaacatggagttgctctggttcaaacacctctgacaaaggtgtccgggcaggactgcccttcctctaggggagaaggctctagaggagaattgttctttgcctcttccagcttctggtggctccaggagttccttggcatggagctgtgtgactccagactctgtcgccttctttatatggccctttcccctatgtgtctcccctgtgcctgtgtcaaatgttccactcttttttgttataaggacaccagttattggatttagggcccatcctcaattcagaataatctactctggagatctttaattatatctttaaagactgttcccaaataaggtcacattcatgagtactgggggctaagaaatgaatatacctttttggggccactgtacaccctcactatagaggtttatgtttgttctcttaacctgccacctctccaaagccaaaccttccttttgagtccatgttgtctcatattcctgaatctaggatcttgttctgttgataatgtccattttctcttttgtatttttttctttttttttttgagacgtactctcactctcaccaggctggggtgcagtggcgcgatctcagctcactgcaacctccacctcccgtgttcaagcgattctcctgcctcagcctcccaagtagctgggactacaggtgcacaccaccacgcccagctaattttttgtattttaagtagagatggggtttcaccatgttggccaggatggtctcgatctctcgacctcatgatctgcccacctcagcctcccaaagtgctgggattacaggcataagccaccgtgccttgtctcttttgcatttttaacatttttgacttgatccttcccttcatcctgcaagtatgctctaaccttaaacaaacaagcttctctctgactgattctatatttgacatagaaactcctttctaacaccaccaacacctcacaaaagcctccccctccacaaccattccaaggaaggatcccttctctttttcattttgcacccatttctgggctgagttttgctctcattgcaaaaactgcctttctgtatttaccaggaaagttcaggttgctcaacccctacttaaccccataaactttggttctctttcatccttgtgattccctctgcaatgactcttcctgtttgaagaagtttctctctgaccttggagtataaagttaggccttacaggggttctccagctaaaagaaaaactccctcaataatactctgcctagatactaatggattattttccaaacttaacatttgttgtattccctcctttacatatcaactgggttgacttttctttaagaatcaacctaatgccaaaataacatttccaactgcctgtaaagtggacaaaaggtggcttcttgttttttgtttgtttgtttgtttgtttttataaaaggatatctattacaacaaaaacattatatccatctcccagtgtaacttcacacctgttcaataggtttgagccatcctagtctaatctagtcttcacctggctttgggaaggcaaccaagacaaggacatatcccagtgctttgcaatttcataagaaatggatttagactctaaccacagtgactttcaccaccttttataggcagggttttggagtttctgcagaacaaggcactcaccattcacagtggtccctagccatttgctgattggtcattctgagtgcatgttctgggccctccgggcacagcaagagaccagggatttgtgaattctgctgttgttcagactccaggcagcagccacatctgtgattggttgctgcgcccttgcaatcttagttttagtcattttcttagaaaagcatccatgtcagtaagatttttgaggctattgggataaatctgtatacagtattctgctgcaaaatgttaactctctctgtattggtagttatatctcttcttattcctaatattaatcacttgtgttttcactttcttcttattttttcaattaatctgttcagtaaattggcttctagtttactgattaattttacttaactgtctttcattcatttccttttttaactcttattgatatgtagtgtacgtataagaaggcacacatagtatagcgcaatggatttccacaaagtaaatacacttgattacacaagtgtaatcaacactagatcaagaaacaaaacagtactgccgcagctcagttaatggttcctattgcatgttcaatgagcctccattccaggaaaattcccagaacccccgttcatgagaccttctaatgctacctcccaaaggtagcatgatcttcccttttaacagcataaattcgttttgtctgtctcttttcctactttatatacaacctacttatatgaaatatatgtactcttgtgtctgatgttgctatccttgtagcagctttctcttcggtaactcactttgagtgttttcagaattggagacaatcaatgtaagtcacctagcacaggctctggcctgtaactgaggtgtgtaagtcgcagttattatcatgaaaagatggcattatctacagatgggtgaagtgcagatgaggagaggagaaggtggggaaagggaaaggaatatgtgcagtggacaaagcccaaaaaatttatcctgagaaattcccaaatgtatcctggccaggaccaagaccagaagacccatattagaaagcaggattttggtacctcctttctaactgtctgctgagataagtaaggttttattattttcttttttttttttgagacggagtctcgctctgtcgcccaggctggagtgcagtggcgggatctcggctcactgcaagctccgcctcccgggttcacgccattctcctgcctcagcctcccaagtagctgggactacaggcgcccgccactacgtctggctaattttctgtatttttagtagagacggggtttcaccgttttagccgggatggtctcgatctcctgacctcgtgatccgcccgcctcggcctcccaaagtgctgggattataggcgtgagccaccgcgcccggcctattattttcttaacatcctaacgttttattatgaaaattttcaaacacatcgaaacattgacttttacagtgaatactcacgtgtctaccacctgggttctacaattagcatgttacttttcgtgctttgttccatatttatgtctgttcatttgtgagttcatctttatattttatgcatttcaaaggaagcagcagacttttagtagtgtttttctttaaagaaatatcattcatagaacacaaaattagccgctttaaaattaattggtatttagtatattcataatgttgtagaaccaccacctatgtatagtttcaaaacatttttgtcactccaaaataaagcttcttaccaattaagctgttactcctcattctgtcttcccttcagtccctggtgaccaccaatttgatttctgtttctgtggatttacctattttggatattttatgtgaacagaatcatacaatatgtatttgtgtctgatctgtttcacttagcataatgtttgtaagtttcatccacttccagcacgtatcagtagtccgttccttttatggctgaatgagatcatggtatgcaaatatcatgatttgtgtatctatccattgatgagtatttgggttgtttccaccttttggagattgtgttacttgagcatttgtgtataaagatttgtttcagaggttgttttcaattcgtttgggtatatacctaggagtagaatttctgggtcatatggtaattctgtgtttccctttttgaggaactgtcaaactattttcttggtaggaggtttttgaaccctgggaaatcacttgctcaatttggatcattctcttcttcagtttttcccttgagtagcttcctctctggataaaatatgcagggattttagtggcatgtgagaagaggcactgactagacaggctacagtttcctctcatctcctgtaggcatgtcaactcacctggcattagagggacccagcggatataacctgcaggggcacccacggctccattaatggttcctgttgaatgatcaatgagtctccattccagggaactgccacatggagcgagacccctctgacactgcgtgagcccttgatggctgaagcagcaccaggccccctcatggtttcctgggttctactaggagctaagtacaacaggtttgagttggagagagtaatttgctaaagaaatgcctgggagtggcagcttctgaaacaggcgctgacagctggtgagggatttcatagggctgcccctgctccacgagcctgagaaaacaggagaaattccaactgttgcatgatatcatctgtgccttagtagcatttgtttttaaactatggatttaattgctgttccatcagctcctatttcttctttctcccagaaaaatggaatatttgaaattcccaagaaagcacattcaattgccatttctgttccaacttcaagacagaatcatccttaataatgaaaataaatctgttattggcaaagcgtacccaagtgttgctttaggagagtcaggaaagggaagcagcaaagggagagtcagagcggagcagagccagccacaaaggctgtttgtaagcatgccaataacccaccatattttgtacagcatgttatcatgtgcaaatcaggttcacaacaaccttgtcaggtaaagcaagaaggtgctggtggatcttgattttgcagatgaagaggtccagattaaaaatgatatggaacttactcaaggtcattaagctagcaggaaacagacccaaacctcaagcccagtactattgctgctgtatgaggaagagatcatgagagtccaaattatcaggaaaataaaactgtggagtcatgtagcacctggaattgtgctattttaattgtgattcagccactgacaagccacataaccatgagtaggtcatttagcccctagcttcattttccttctctgtacagtggaactaacgatgcttaacccataaggttaatgtgtagttagaatgtaacaatgtacgtgaagtaccttgcatactagtaattgcaggtgttcaaaagttgcagttttcttgcccaaactagagtatgctaacaaattttagaaaatctgttctcagcatctcctcaagtttggctctttttctccatagtgtcctaaattgcacatgctccagccccaagcagagttcttccaaatgaaaaatattattcatggcataagaacaatggaggtactttgagatgaggggcccctttgcagtcagaaggtagaaagaatcaatgttcattacataattgggataaacattcatttatatgtatagctgtcaggaagcaaaacctgatcaaaggcctattagtcacaaggcaggctttgcaaagggccacttagttaaggcagtgaatttaacatgaaagggaagaagggctggaacactgcagcctggtacattgtgcattagtaattattttgttcctagttctgcaagctttctcaaacagaagttaactgggatcctgaagactgaccatgtcaagcactgacggcagacataggcgagtgatagtttttcatccccttgtacaatttctgaattggacaaacttgacgacaagactgagaggcttgacacatttttcagaaaatgctggttctcaaagacagactaaccctcttgaaccattacagggcagaacagaactaattgctctggcatctctacctatctctgatacacaatttggactttgctaaattttggaaaggtcattcagtctgaacttctgtaaggtccattctgtactctaacatttcaatagcacttttctgtaatatggaattctcaaccatgacaattgtaatattactagtaatatttatatcattttgttctataaccagtgtgagccataaattaatatgcatttgttcaacacccacaggacaccaggtgctgctactataccagagatgggtattgcagaagtacatggagagataaatgattttgtttatttttcacattttggaagcacattttcattatacaagctctcagcacatttgcataatctgctagttgaattaatacattgacaatgcatgatggaattgccttcactatgttatgaaggtataattgtcattattgttataattaccctcacttagtgagcctctactatgggggcactacatggggatagcagagaacaatgattaatattaccatctctaaatccacattgctgtgtttggatcctgactctgccgcttactgtgtgcccttcaaatgcagcttgctttctttaagcttccgtttctccatctgtggaatgggattgataacaatagcctctaccttatagtattgttataaggactaaatgaagtaacttttgtaatgcaaccagcgtactatttgatacaatttaataattattataattattatcatatgcaggtaatttggtggagaaagcagaaagacaagaaaaaaaactaaaatatttttgagtaaacatcatcaggtagcattctcttctgtttgtcaccaacctacctttccaaaaataagaattgcatcagtcttatgatagatttgatttctgggatatctctagggttgtggtattaaagttagtagaaataaaatctttgctaagattttatattcttatggtatctatttttcaataaggaagtaaaactttgatctaacactgagtaggagtaacagcaacacaaggagacttatccacccaaaccaaatgttatcaatggctttgttgtgtgaggcaggtagataatattggagagaaattaaacttggccttatgctggccttggtcctgaattgggaaggggatacttcttcatctagaatagacagacttccccactgtattggtcaaccattgtattcttccattttacccatggagggtaatagtaacccttgattcatcctctgaaatgctttcctcttgagacaataaagggataaagaaccttgggttgcagggctaggatgcccttcatggatagccaaaatatgtccaccatcacaaggaaaattcagctgcaacctatggacccgatctaaacctgccttcccaaattctcaaatccttggccctcaccaactttttcataagtggccctgctcttgtctttattccagccctgacatgtacatacctgtgtgtgattttttaccctcctggcactttttggactggccttctggctcctattgttttcacatttggcttattttgtgcattttctaaaccagtctttactccccttctctggccaactcattggcaactttgacaagtaactcaagtgctgatcttcctttcaacgtatgccttgcccctacttctagggttctggatcctaaatgtgctggtaatgacagatgtgctttctctcccaccttggaatgtttactgcatttggcagcctcttggtgggagtttcctgtgatatcacctccagaaccaaggagagacaggttgtcactcatccattagctgcatgccacttactttacaaacactatgctaaatacatcatctcgtttaagtctcataaccactcttaagaagaagtttttgttatctctatttcatggagaaattttagattgtattctagtcattgtgttggtatgccgtggagattctagattctgttatattcctctaaatagtgttaatgtttttgttgtagcgggcagtaaatttgtttagattcaaattgcatactctgtctagtaagacacctgtggtaggcagcagctcaaatctcagttcaactcttttagctgggctacttttagtcttcttcatgcatatgtgatttgagagtaaggcacagacctggccagagttgacacagaaactggggctcccctactccatcattttcctttctgggcttccttcttccctttcttgaagccctggtcaccttgggttctatcttcaattccttaggccacagagatggtgaatcttctcttatgccttcagccagcctgtgtcataccatgactatggaccattcctaggacaaaattgcaggaaaaaaatgggggagctcatgctctgttgatctcttcttccaagttttagctcccatctaaaatccacatacctttgttagctgtccatagtctttgcgtatattgtgtcttttaatattttgcccagagtttataactgttgtttgtgcatgtcagattgctgggtaattattccactatactgaatgcagaactccagaaatgctcaataagtgaacactcttattattattctcataataagtcctctctttctgaaagtcacagaaacacagataccctgggcaggcatcgtggagctgacagacaaaaggatccaaaatgtatctctggaatatttacatcactcagcagtggttctctccagaagctgtgtgggaacatcaccctttctgagtctcgatgtatgtggagaaaaggaggaagacttattttcttgagtaaagcacagttggtgaggtgttaagtctctcctagccacctcacccacggaggacacatagcaaacagctctcactttagagacaggaggattttcaaagtacaccacactggcaggatgggacaagccagcattttagagtgatcaagagggcagaagactccatccaagttccctgtagctcttaaacgagtggggctgacaaatagggccagctcattcttctaaaccctgctgccagagcttgaagtctatctgtggaaaaggagccaaaggttgtttctcataaggagtgtgacgagggccaaaaggaaagataactgcccccgaggaggcctttcatgccacaaggcagcagaaacagatgctgcttgagaatgattcacttcttagatgcctccatagcatcagaaagcactcccaatgcactaaaacagtttgaaaacgtagacacttccattctgcctccccaccatactggctccaatcacatacctagcaactagtcagagccagaaccagcatcattagtgccaagaccaaacagaggatgataccagcagtggggcctagcagagaagtgaccacagccagatgatggcacaagctcctggaagctgacctgccccattcatcctcacaagccaggcacagtcaaaataagtgaaaagaagaaatagagtcagaaagaagaggagaggaaagacccatgtgaaagacactgtgagaatgagattgtagattagacattgtctaagactctaactatcaggactgggctggataaagaaaaagagaaatgacaaaaaaagaagcttcctgctctaggcagataaagagtttggggccagtaaaaaatatcacagttctgaggataaaagggagctttgcatcagaacgtgacaaggtggtgactccctttttgcactgcctacatgcacagaactctgaatctagtttctgtaaaaaacattggcacatttgagcacatggaaatttaacctctgtaaggtgggaggtactctcaataggctaaaagacacataagagggcagggtaatctatttataataaataaattaaaagacatgtcaacaaagtaactcagaggaaaggaacagttgggcaagtcacaaaagcggagagatgaatgtctgagaaacaagaaacaaaaaaggcttggttactcagagattaatggaaatgcaaataaaacaagaaaatacgtttttcacctatcagactggcaaaagtgtaaaagattttcaatttttaatgttgatatggaaatgagggagacagatactctcatctcatgatgctgaagtccaaattaggaccatacagtcttttcagagagcaattaacagtacctgtcaaagtattcaatgtgcttgtcttttgataatcagtcaggtatctatcttatagatttccttccaagtatgtaagaatatatgtacaaggattgtttgctattacttgacttgtaattgggagaaaccagagacaacttcaatgcccaacagtaagggaattattaaagaaattatggctaatccacaagattcaggattcaggaatattattcagccactaataagaatgaggtgcatctgtgtaaataaaagagaagcttgtccaagataatcgttgagtggcacaaggatgttgctaagcttttctgtgtgtcattctccattctcagaatgttatactaattcactcatttaatcctccctatactcctaagacttgatgctattgtttctacaccatccccacccaccgccatgttaaccatgtggtaactgaggcccagagagcttaagtaaattttcgaggttggctccagagtatgtgtctttaactattatgctctattgccccttatttttgtatgtatacacgttttatgttttcatagagacatagaaagtgtgtgttttggaaaatgcatataatgcagtatatgtctatagtgtgccacctagttgccctttaaataacaaggcacacattcacccacatgcttgagccattagctactgatggcttatcacgcaatccctccccagaaactgccctctgtcaaagggggctgcctcctccatgttcaaagccgcttctgcagggttgaggggcaactcacatccagtgatgctggaagagcgtggaatacaaagacctggccccttgcctccttttaaaatgattctgaaggtctatcttgttactagtggtgaatccatgcagatcggcagcaacctcaattcttgcctcctcagaagaaagaatccaactgagaggcatacggcagaagaagagaccaaggcaagttttagaacaggagtgaaagtttattaaacagcattagagcaggaatgaaaggaaggaaagtacacttggaagaggcccaagctggtgacttgaaggacaagtgtggggtttaaccttttgtcttaaggttttatttgtttatttatttatttatttattatttttatttttttgagacagagtctgactttgttgcccaggctggagtgcagtggtgtgatctcagctcactgcaacctccacctcaagggttcaagcaattctcctgcctcagcctccagagtggctgggactacaggcacccgccaccacgcccaggtaatttttgtattttcagtagagatggggcttcaccatgttggttaggctgatcttgaactcctgacctcaggttatccgcctgcctcagcctcccaaagtactgggattacaggcataagccactgcacctggcctgacttagggttttatatgctgacctacttccggcatcttgtattccatttcccttgattcttcccttagggtaagctgcctgcatgcttggtggcctgctagcatttaggaggtaagcaagcacagtgcgtttaggaggtgagcaagcacactggagttgtacacatactcacctgaggctttcttcccttttctggtggaatgcccctggaaggtcatataccagttaaattctgccatttgcctcttagtgggcgtgtgtgagcccacgcaccgaactcctgagatcttatcaggaagcttctgatcaccaattttaggttttctctatctacagggaaactgcctttccctggtgctggctgcgaccaattattattttacagaggcagtgtgacaactgcctgaccatcacttgatgggcgcctgactttcctggtggggtttgggggccctctcctgccctgttcatgtctgactagctaccagttagtaacacatcccagtttccaagctccccatacaaatcagctaaagcctttatggaaactagacctcagttcatcttcccctctgcccaagctgcttcctgatacaaccaagtttttgttgttgttgttgttgttttgttttgtttttgtttttgtttttgtttttgtttttgtcctcttggcttctccaagttttgtctggaagatttgatatttttgaatctccacgggctctattgtcagatggtaaaggaaacctgctgcatttttttcctcaaatccctatcacacacacacaaaaaaaaaccacgaggcactgagccttgtcagagttctgaatttattatataaaatgaaaagaggtgtgcattcagcccactgagagtaagatttgctgatggagaggacattgattgatttagtggttagaacagaagcccaggaatttctaggtctccattttacttgaaaaactggtgcctcgtttgttcattcattctctgtgcattcattcattcattcattgatcaaaagtatgttgagtgcctagtccctgtcaagtattatgctttggggaggtggatgggcttgatcacaatctggtgagacaacacaatgacttccttgttggtgagttactctctagatgttagatgtaccgttcagtgaacttggtccaatggaggacaaccagttgccattgcacctgtcccagtgagctctccagggtttaggtaaatttgagatgaagtgagtcactccagcccacagacaaagctactggagaattttcttcctgagtggttgcagagattctcttttataccatgtagaacaaatataggaaatttcctgttaaatttagatagcaaatgtattgtgataactgctgatgataagagcagccttttgctcttaaagaatatttgggtgagtgataagattctgagctgacagtcgagaactgaaatcacatatgcaaatggaacagtagggaagctaagtggacactcagagaacggaaaaatgaataagtgaatcaatgaaactcaactgtgccgagaagaatgctttacacattgcaggtgctcaataaaggtcactaaaacaaaatggagaaactgaagcctacacactgggtaacttcctctccattttccttccaatgtattttgtgcacctatcatgtgttagacatatgcttgggactaatgcctttgcacacgctaagtcaaagcatgctctacaattccaggcagaattgttctccacactccctcctactattttgccatatccagatcctttaaaaagagcttctacatccagagaggaagaaagagagagagagaaaatgaaagctcaaagtcatttcacatgtagctattgaacttaaaccaaactggctcttgaaatgattcttttgacagaggatctgctcttagagcaacagaagcattatgtcagtgcagtgatgactgagatatttttagatgcccatgttctgactttaagcaaaaagtggagctgtccagtactcagcagaaaccggcatccaacagcagaaacctctggtattgtggggacgcagagctaaggtggctgagggaaaatccaatcagatgttcaagctcaaatttttatgagagattacataggacctttgtttgtggaagtcacttttgaactatgaatagcacttgcctattcttgagtagtcatcttacaacaatgtaaatgacatgcttagctgaaacctactgaatgaataccagttgacaaaaagaaaggattcaaagtaaaatgtcctcaggctggtaccatgaaggaaagaagcagtcaggtgggaacagtggtgacctagagagcctgtactcagagggaaggatcatcaaactccaaattcaagcccattatatagccctgtgggaattcagactctggtatgagcctaggatgtttcaagagaagcaggaaatcttgacttctatcgaaatttctcaatatttaagaaagaaataggcaccctctagagacatattttggttaggtttaaccaatgggaggcaccagaaggcaaatggccacctcagagagtggggacaagggaaaccaagaggatgaacaggacgtgcagcagttggatgttgtcacggcaaccaagaatggggtactgggaaaggataacttccttcttcccttttttcttttgtagctttggcatttagataaaaaccatgaagggtattgtgtgaataaagacctgattttccctgtaagacacatttggtttttctctcacactgctctcctggctttgcagcaccttggagaagtcgggagaggccctcttagttctgaggtgactgagcctctatcgtgtgggctggctgtgtatctgaaaatatcgagctgtgctccaaaagcttttccaccgggtaagggcctggtccttcctgcgtgttgacagtgtatctttgaggaatttgtaggaaaaggtgggaaaacagaatgtgttaccaaccttctttagtacagataaaatatacctcatgctattctttgttttctccttggattttctggaacttcattttactatctgaaacttcctttccaggcttgatgaagaaagccttcaagttgtagaatgagatgaaagtggctctgggctggggatctggggacctaggccagttgataataagttgagtttggtcaagtgtctctgaaactcagttattcttacttgtaatgcaacagcaataaggtgatggcctactgtgaagtcgggagcctcagacccagggcagacaatctgggctcagttcaagatttaatataatctagatgtgtgattttggtagatcacgtctcctggtttcagtttcccaattggtaaaattaaagtgctgagttgttcatttatccaacaaatatttgttgagctcttaatatgtgccaggttgttcaggagttggactaatgttaaatatttcatagttatttctctggttaaatgttgccctccaaagcatatatatatatatatatatatatatatctccacatcctaatcctgggaacctgtgaatgtgaccttatttgaaaaaaggctctttgcagatataactaagagatgaggtgatcgtagattaccaggtgagtcctaaaccctttgacaagtattcttgtcagagacacgcagaggagagaacaacataggaataggccatgtgaaaacagaggcagaacttagtgatgtggccacaagccaaggatatctggggacaccagaacttgaaaaggcaaggaagaattatcctctggagccttctgagagagtatggccctaccaatacctcgatttcagacttctgggttccagaactgagggagaataaatttttattgttttaagccactgagtttgtggtaatttgttatggcagctttaggaaatgaatacaatgaggttcaggcccaccaactggcaactgacttctcctcttttgtgggatgaccatctgtggatgcgcaagggactttcatgaagcagcaacaccatttggttcaactcaaagctccctgctgagggtacaatccaaggtggttctttctgctcaggttaccatggtccccaccacatgatgatgtcattcttgagggaggcagctggtttaccaggagaaaacatctgactcaagcttgtaagcaggctgtgatgaacaaattggatcgattaaattcttctctttgcagagtttgaatttaagacacacaaaaaaattagttgttagaagatgcaaaagaaggaaatgtgaagaacctacaaggtggtggaaaacatatataatttaataaatgtaatatagcattaaataaataattagaataaataattctaaataaaatttagaatttaataaataaaatatagaatttatggtagagaaaatatgcttttaaaaatcaatttgtgccaggtgcagtgccgcacacctgtagtcctagcactttgggaggccaaggtgggtggatcacttgaggtcaggagttcaagacctacctggccaacatggtgaaatcatctctactaaaaatacaaaaattagcctgatgtagcagcaagtgcttgtaattccagctactcaggagactgaggcaggagaatcgcttaaacccaggaggcagaggttgcactgagccaagatcacaccattgcactccagcctgggcaacaagagcaaaactccatctcaaaaatcaaatgaaaataaaaatcaatttgttatgtttgaaagtggattggcccccactgggaaaaggattactgtttcaaagttcacatttccaatgtcttctcttgccactctccccatttgtcagtgcattttcaggtttcccccatttaaggtttttatcaggctagccagaggcttcacctggattcttctcctagggcttcttacctgaaccatatgttggagataatcccatcctggacagcagtcctggcttccagaaacactggcctagcccacgatgtcttctttttttgttatctgagaaatgtgcacattgtcctacagaaacttactaaaaagtcacagagaccggcagtagatgactgttctagctccatgcctagtgccaggttcacactactcctgaaaaatgattaataaaaaggataacaataagtatcatttcttgaactccaataccaagtcaagtgccagagtaggaatttagcatgaattatcttggattctcattataattctgccagggggatagtatcatctccttttcaggcatttattattaacagtatttatctggcagaaagtttttgaagatcatcgatgatatgtctaaaatggtacacaggaaacacttatgttggttgttgctgctgccactactactactgaggagagtagctcaggaggttatgtaatttctccaagggtcacagagatggcactgatggagccaggatctgttccttgacctgtttgattctgtgtctgtactacttttgactatttcccaggtctttcatggggaacaaggcaatggctaagccttagccatgggtgaatctggtcactgacatgacctggattgccccagaagggcactgtgggctacacagtaactcttcactcttagaagggaagtgactgtggacaacagtgaccatgatgcctcacctgaccttggaaagcacgtgtggaacccactatgtcctttcagagagactgtggtttctttatccgggcagtgtctctctactcagcactctctaaaatcccctgccttctgctctagatacctactgcttcttttgcccttcaatttagctcaacgccagtggactcccctgcacttgatggtgacatctgtttccattctagcctccagaaaatttttcaaaagttcccattgacccacttgttcattgcaatttttgttggaacacccctcccagtccttgagggttaacattgtgatggacgttctgctagttcttctaaaacagaggttggcaaagcacagccactgatcaagactagacaactgcctgtttttataaataaagttttattggaactttattaagtgagccatgctcatttgtgtgcctataatccatggcggctttggcactgcaatgtcagggttaagtagtcacaacagagcctgtatggcctacaaagccctttacagaaagagtttgctgacctcttccctggactatagaatattttctatgtacatacctctatatgtgtgtgtgtgtttgtgtgtatgtgtttgtgtgtgtgtgtctgtgtgtgtgtacattttactgagactcaatccattaggcataggcatgagaggttttattaattccagtagccatcttcacctaagtcacgttgctcttactttccctccaggtagaatcttctttaatgatatctaggtccacttttataattttcaaccaccttcagttattaaaagtctctgtctggtaaactgattaacacatctcgttttttagcaccagctagaagtgtggccctagctagttcagaacatattccctggctgcaagatacatcccatctcccttttctactcatgaaacaattttagaggaatgaggagggagaggtggaaaaatttaaaactccttactttgctggtgatactgcatttctctctttggttagacaaacttaccaatcttgctgtctgtctgtcagccccatgaagatggctggtggctccagtgtgggggaatgagtgattagttgtcaggcattggaagccccctgaggcatccggtcacttcttctagctggtttctagctggtggcagtcaccacacatctctctgatatgtccctctttgcctccccatcccccagtactgcataggccctgtctccagcctccactctcatctcctctcccctccccagctacctctggggcatgactccctccacctatcttcctcctgttctcctttctcctggctgacatccttccagggaaaattactgtgattcctccttacagcacacacttcccaccttaagatgggattttctgtaagctttgtcctcccttgtgctctcctcccccttgagaagaggaatgataacctctcacttcaacccctgtatacctcacaaggctaatagcttctttagcatctcttgttattggcccagagggaaaaaggaggcacatgtataatggtagtagaatcaattctggcttggtctagcatggcttagaggagggtggccacagccagttgctagtggctctccttagaatgtaggatgcttagcatttgttctcatctttggattgtaaccactatactgataaaaaaaaatcacttgtcaatttcaaaagtttgcatttgtatgaacatatgtggaggagaggattttaaaagggcgaaggacttttcttgttttgaagaaaataggaaagtgttctagttatcatgtcaaaacttgcttttacctattcactgatatattgtgaatacctttctgtctttgtatgtatacatttacattaacctttttaatgtctgcataatactccatcatactacatcctctgatgtatttactaattttcctattgatgaacacttagattgcataaggttttactaccataaataatactgcgataaatacaccatatacatgtccttgcacttgattctaattatttctctggaagaaagttctaaaagcagaattgcatgccagagcatatacataattttattctgatacacagttctaaagtgctactttaacactcccattaacaatgaattaaagagattatttttcttctacctgctgtccaatactgaatagtatcagttattttaagatttgccagtaggagctaggaaaagtgatattatctttttctccccctaatataaattcaattcaattaaatagatgtattttgcgtggctgccaggcataaggcgcaaagacaggaagaagaaccatctctgcctatatccccataaaggtagtgaaggaaggctctagggtgtaatggaagcagcactgtctttgaaagaaagcctggtattcgaactgcagctttgctatttaccagccgggtcatctccagcagcagctccctgagcctttgtttcctcatccaaatatgtgcatgataataaccttgtacttggcacgtattggctggaaaatggcatctactaccaccatggcaagagagactttgctaagtatatgcaatatgaaagggaaagatagaaaagaaagcatccatgcttactgttgaaagcggaaggatatcagggaaagatttgtggatttgagttggacttgtttctttgaaagatggggctgcgagggaagaactgttgtaggaaaatgtgtggagaaagatgttaagcatgacgaggtgggagtggggacagaatgcagttctgagtggctagggcagagcatgtcacggagtgaaatggggcgctgtatagtgtatgagccagaatgtgagcactgagtagcaggtgcgggtaagtcgttaagtttccaacctatctgcaatagagaagagctgaaaattttggaggagaaaagcacaggaagagagcaagcagtatgtcacctgaaaggtaaactttgtaaggacttctaacccaccatattcaatttgcttccgtactgacttatcctaatgaaacaatgaccccaaaccatgatcacctaaagtagcaatggccctttcccaatctacaagaaaattaggtgtagaattgtctctgtgcttagggtattctcctgcctttttgcttttctttctttaatctttgatagtcacaaacactgtctactctagattctaatacaaaattgtatctggctcatcataacattgtaaagtgttgcttattttttcagatggggtctcactctgttgcccagtctggagtgcagtggtgcaatcatggctcactgcagcctcaaactcccaagcgcaagtggtcctcacacatcagcctcctgagtagctgcaactacaggcacgcacctccacatctggctaattttaaaaaaattttgtacagattggctctccctatgttgcctaggctggtctcaaactcctgggctcaagtgatcctcccaacaaggcatcccaaagtgctgggattacaggtgtgagccaccgtgcctggctaggcgtttgctttaatttgaatatattataccaataccaacgtggtgtttgcaaaaagtatgaggaattctgtgtctccatctctgggacacacttgtgaacaattgttacaaactatgagcatcttcagggcagagactggtgcactatttattcttgttttcctcccagaagctggtccaaagcataagacgtagtagcgcctcaaaaaattcttgttgaaataagtagaatattctgaattctgtagagaatggtagaacgtgaaagagagatataaagtcctataccaacccagcaaagaagttggtaaatggttcaacaaaaatgacagacatataataaaaacgttaatcaaaactgtaaaacacaatgaaactgtaggcatgatacaataaggtcattgagtaaaattgtgcaactgatattgcaatatatattttaaatgaatagggtttatttatcaattaaaatttatttttaaaatacttcatttttcttccaaacaaatcacacacacacacacacacacacacacacacacacacacacacagagttcatttctcaacattcttttcactgcaacatttgacataggaatagaaacagattgttgaaccagctttttaacaaatgtggagcagcaggttctttgttgaaaaactatttccacttatcaagaaatgtttttctctgaaaagaagtgaacactgtgttcaaagcattgacttccttataaagcaaattgggagccagctcatttttccacactgataacgttcagatttgaattatttcaatcaaagagggagatgctcaggattgacctaagctaaagcagccagagactatgtggtcaagaaaaccgctttatttgagaggattgtgattccagctagtgctgcagaggtaaatgtattaactagttgaattgatatgtaatcccctgtaatgtatatgtaaacttcatgtgtgtacatggagagggacagggagagtatcatttcccccacctcaaataatttctagaactaagttaaatatgtcacttatggaaacaaacttaattggatggcatttccaaattgctgttacctcgaaagcttgcaacaagatatgtaaaagaagaaaagaagacaaaagaaaaattatcataaagcatatgtttacaaaagaaaaacaatgtagcctttctgcacaagtgccccagggcagctggaaaaaagggttggtacaaattagaaatggtctgcactatatagagacccatctgcctagaggaaccagtaaggaatttgctctttcttttcttttaatttgtctgcatcacaatgtaggcacagggagtgaggtagtatttttttttttttttttttttgagatggagtcttgctctgtcacccaggctggagtgcagtgcagtggcgcaatctcggctcactacaagctctgcctcccgggttcaggtgattctcctgcctcagcctcccgagtagctgggactacaggcaccccccaccacgcccagctaattttttgtatttttagtagagacaggttttcactgtgttagccaggatggtctcgatctcctgacctcatgatccacccacctcggcctcccaaagtgttaggattacaggcgtgagccaccgcgcccagtcggtagtatgttttttaagctgtgcaacaaattcctgtgaatttagcagcttaaaacagcacccatttattagctcacagctctacaggtcagaagccaggtgagtttgctacacagcatctcacaggccaaagtcaaggttttggccgtctagagtctcatctgggagggtctgggggagaatctgcttccaagctcattttgttggcagaattcagtttcaagtggtcgtaggactgaaaaccctttttccttgttggctgtgggtgtggggttgttctcttctcttagagaccactctccctggggacctccagactcaatgcctgccaagttgcttggaattttctcatgctttgattctctctgcctgcagccagagaaaacactttactcttcaagggttcctgtgattagattaggttcacctggctagcatgccttttgattaattcataatcaaacaaattaataattttaatcatatctgcaaaatcctttatgccaggcagcataatgtgatctcaggcatgatatctcatgatgttcacagtcccaggaatcagggtgggccaccttggcggggagagaggtgtatcctaagattctgctttccacagggaacatgaccaagacctgtcatgatggcatgatattaaatcatttattttattaatttccttctagcacaaagagttcagcagcttagtgacaggatgtgggccatggtgtcagtctacttgggcttaaaacctagcttctcaactatgactgtgtgaccttgggcaaagtaaagtcccttctgccgtagtgcttgttttgaacgtgccagtggctccagagacactggcatatagggaagattttaagcatcaggcagtcttcccatttgcttatgcacaatttccttctcatggaatactaagcgcaaaaaacggcacccaggaataaaaactgccatttaggaatacacgaaatgcacacatttcaaacaacttcctcagttcactgcatgcgttatgagccacacccatccaagaagtgctacaacttgccttctgatttcagatgatcccccttctacaacttcccaagtttgctttcgcaagtaaatgtcaagccccaaggtgaagttccgtatttattgtagtatttgtgtatttcttaactaggtaatgtgcataaaactatactactgtttttatgagttccctacctttattttaatgtgtaactgatgaagtttcttgagtgtggtacctgttataagttgaattgtgcgccccaaccattagtatgttgaagtcctaatccccaatacctcagaatgtaaccttatttggacattaggtcttttcagaagtaatgaatttaaagtgaagtaatcgggtaagtcctcatccattataatttctgtccttataaaaaggagaaatttggacaggtacagaggaagaatctgtgaactcacacagggagtacaccgtatgaccataaaggcagagagcagggtgatgcatctacatcccaagaaatgtgaaagattgccagcaagccaccagaagacaggagaggggcatggaacagagtgaaccttacagccctcagaaggaaccaaccctgcccacaccttgattttggacttctggcctctagaactgtgagatgcactttgtggtatttttgatggcaaccctaggaaactaatgcagacacaagccaaattttctcataagccctatggatattatttcatggttttgcagagtaaaattatgattttcagcataattttcaacataattttagcatagaaagataataacacttaggaatgtatatattgcattatagcagaaatgactgtacttaaatactgtctcagttctcagttgtttcttcttttttttttttttttttttttttgaggcgaagtcttgttttgtcgccaggctgccaggctgccaggctgccaggctggagtgcagtggcatgatctcagctcactgcaacctccgcctcctgggatcaagtgattctcctgcctcagcctcccgtgtagctgggactacaggcgcacaccaccacgcccagctaattgggttttttttttttttttttgtatttttagtagagacggggtttcaccatgttggccaggatggtcttgatctcctgacttcgtgatccacccaccttgacctcccaaagtgtcgggattacaggcatgagccatagcgcccagcctgtttcttctattaaatggattccaatatgattattgtgaggacttaatgagactgtgcacgtaagctattcagaatgaaattagcactagtgaatgctggctatcattgctatcctaattaaactgcctgcttcaaaactgaattttgggttaattacaaatagcagtaagggttaaattgtgctccaagtcccaagtaaacagcctaaaatctttatacaatggctcactctagtataagcttgtggaaacagcttctttagagagacccatgtactgtgcaagcaaaagaatacagatgctaaatatagggcctacatcaacacttgcccaaactgggtgttgataaggaatattgctgatttggaaaaataggccttttaagagcaatgtaactattttcagccctgtgattgactaacatcaggataagttcagaggaaactcacccagctgcttgttgaatgctttacttttttttttttttctgatacgtggtcttattcagggtctcaggctaaagggaagtgttggaatcatagctcagtgcaaccttgaactcctaggctcaatcaatcctcctacctcagcctctcaagtatctggaactacaggtgcatgccgccacacccagctaatttttgcgtctttttgttgttgttgttgagatgggatcttgctattttgctcaggctggtcttgaactcctggcctcaagcaatcttcccgcctcagcctcccaaagtgctgggactacaggcaagagccatcacatctggtctgaatgctttaatttggatgaggtgtcctagagagctagcgaagctatacagaaagaagccaggctttatgtctgggggaagtgcttatgccctgagcgcaaagcatgttgagttccttgtgaaagccaggggaggtcactgggttgggcaggcattgaaagatggtctgtgactcacaggagtgtccacgatggaagcagaaatccaaaatgcaggatctgtgcaatgtctgacttagttaagtcaacaaattcccagagaaataagaagtccttggaccagagtggcctaactgagccctaggattttagtctgatgtaaagaacgtgggctctttggaatcagagatgcctagtggaaatcccaaccctgctgtttattggttatatgaccttgaacgattttaccttatttccccaggcctcagttttcttgcctgtaaagtggccataataatagtttacttgtaaggttgttgttagcactaaattaaagagaatttatggacaggtcctggcacatgttaagtgcccaacaaatgacaggtccacatttgtcccttctctacagctgctatgagctacgtttccacagggcatagctcttcccacaccagccagaggccaggatgtggttgtctgatgagagagagatgtaaaatgacctgacctattactggtaccttattgtcctgtgctctacaatggttagttaccattctctcatgttttcatttctcagtatcttctgcctgcctctgcccaccccaaatagtcctagagatgaaatttgaattaaagtctaccagactttggttcagattccaaacaatagtcccaaagtgctttagaacagttggaattgcttttatgcaaaggaactctaacccaagggtagtatgtttggtagtaaatctttactgatggtttaggataatggaagaggaacaacagaaaaaaaaagttcaacatcactaatcatcagagaaatgcaaatcaaaaccacaaaaatgctggcgaggttgcagagaaaagagaatgtttatacactgctggtggaaatgtaaattaattcagccattgtggaaagctgtgtggcaatttctcaaatttaaatcttaaaacagaactatgatttgacccagcaatcccattattgggtgtatacccaaaggaatataaatcattctaccgtaaagacacatgcatatgtgtgtttattgcagcaatattcacaatagtgaagataaagaaccaacttaaatgtctatcaacagtaagctggatgaagaaaatgtggtacatatacaccatggaatactacgcagtcactaacaagaatgatatcatgtcctttgcagcaacatacatggagccagaggccattatcctaagtgaattaagagaggagcagaaaaccaaatatcacatatactcgattataagtgggagctaaacattgagtacagacggatacatgtgtacttgagggtggagggtaggaggagggtgaacatcaaaaaactatcaggtactatgcttattacctgagtgacagaataatctgcacaccaaactcctatgacatgcaatttacctatataacaaacctgcacatgtacccttgaacctaaaataaaagttaaagggacaatataggcaataacttaaaaatgaagattttgaagattgtatggctaagataacccaggtatccctgcccaccaaggatcatttactgctggttattccccaggtttgccctgccttagattccaacttgccttcctcttactggacgtgtctctgtagtccacaccatcctcccttctctctttcctgccaccagtttgtaacctccaaaatgcttgtttctttcttacttgagaatttttattcttcaaactccaggcccactgaaagtttgttctaggcttatctgcacatcttcaaaaatgcatcagtggtctgttagggtggagtttgtgcacagtctctctccgcagtctaagcagagtccttaggtgaaacacagtcagttcatatcactcttctgctcagaaccttccagcgagttctgtgaaagtcctttccagcctacatgatcttcacagctacactctgtcagcctcgtcttttcatccaggcacactggctttcttgcccctcctttatcaggcaaggtatgctggttcagagccttagcacttgctgttttcttggcctgaagtgctgctcccccagatttcctatctttatcatattatttgggtaatattatttctcatattcgggggactcaatggtagccctccaaaaatatatccatggtctgatctccaaaatctgtgaatgttatcttctatagaaaagataagatttagttaaggatcttgaaaaggggagcttatcctggattcttgggtgggctctaaatgccatcacaatatctttataagagagaagcagaaggagattggaggaggcaatataaccatagaggcagaggtgggagtgatgcaatcacaagtcaaagaattgctgacagctgccagaagctggaaaagaatggattcacccctagagcctagagaaggaggatggccctactgaagtcctgatttcagacttctggtctccagaactgtgtgagaatgaatttccattgtttcaagacacatagtttatggtaatctgttacagcagtcataagaaactaatgtagtctctatttacatttgttcatatttcatctcagggagatgtcttttgacactttcatacaaaaatagcccctgctacacacatacacacaaacacacacacacacacacacacgcgcgcgcacatactctatccccattccaccagccagatttactgttcttcatagcattcatcactctctgacacgtgatatacttatgagttcatttatgtattatctatctcctactctatcacgtaagctccataagggcaggccctttgttttattaactgatatatctccagaacctagaaaagcacttggatcaaagtgaaagctctctaattacttattgagtaaatgaatgaaagccttcccctttaactgcataaagaaccttagaaactttgaaattataatttatatttgaagacctcactgcaacccaaacctcaccttcaaatgtatgaccagaaaagtagcaataaatacatttattctactgctgccgagagtaaatctctagaagtcagaggggtgtgtgtgtgcgtgtgtgcatgtgtgtgtgtgtgttgggtgctagataaaaggaagagaaggacacaatgtctttgcggttacatctgccaagctcagatgccctgaggttaagagaaaagtgagctgcatctttccagcccgtccacacctgccaagttgttctttactattttattatttgcccagcaggtttagaacaggagctgtaatggagggatagtcttactttgtcacaactcagaagtgacatgctatttttctgtgcaccaattttctaccccaggaggctttatgagcaatggattaaggggagagaaagtggttcctatttaagtactgaatcttgttagtcaaacagggcagaactgaggctttcactctgaagaacacagaaaaggattgatggatcagatcacaagttacttcgatgcttaattttctggctttattccttcactgatgtttcatgtaacatatctgaaaaatctcaggtgaatagaatgctgattttagactgggaggagttggtactatcttagaattccaagctttcctccttcctctccttctcattccactctaactcatcatgcttccaccattcttccaagggtgttcaacacctttagattcttctaaggatgttcaacacgtgtagattaagtgcttactagatttctgccaccagatgttgtactctggggacataaaggttgattaaacccagtccttatttgccagatgggtcttggtatcctggagaagccagaaatttagacattggagcacagccttaaagaacgagtagaaattctccaggcagaatctaaggagaaggaggttcctggtagagaaccaacaagattaaagaaagtctgttcttcattagagagacagaagataattctgcatggccggagggtagggtaatgatggaggtggaaactgttgcttgagaggcaacaaaagccaagtcatgaggcattccaccgtgctcaagtactgggactctagccaatgggtaactttacagaaggacattcactggagagtgactcagtcacttcacccttctggttgtacatggaagatagatgagagaaatgagcagaagagggagactggtttggtggctatgccaatttcagaaggaagagacgaaactctaacaaagaaagcggcaacaaacacagaaaagatggagcaaattagatgcaagtgaaccccacaggcactaataatttgatcaaaataattattctctccaatattcaagccacaattctgctgcaaaatggcagtgaaggcaggaccagaaaccagaaagaacttgtgcactctcaagtattctgtatctgtcccatcttctctgcaaggaagttgttatacaagtaacggatgaatcagatatggaaaatgagattgtggaaggagcctgctggagctcctaggattttaaggttagatgtctgtgccattcaacttttctgatgattgttgtaggtgatgaaatggagccagtgagcataacctatggatccctgttgtgtttggagacaatattttccttcagattgtggacagatcaatgtattacacatgaaaaatgtagcagagatgttttagtgtagtcatcaaagctaccctgacatgcatctagtgaaccacatgatgattattttatgacgtattaattaagtagcaatagtaaacagttgctataatgatagctcttggccttctatttctaaagttaattccagtgtttttgcaatcccctagtgagagaggagatcagaggaggcagtagggtaacagagacttagtagtcttcagataccccttcccttctccaagccaagctttccagctgaagccttagacctgagcatcctcaggggcatcttaaagaaaaagtctattctgtcccaattcccaaatttaggatgtagtgaatttgtcctttggggttcccccaaacttcacctgtagtttggatcctatctaggttttcctggattaagaacacagaactctttagagagggttctgtaccattgttattatgggctgactgtgtcctcctgaaattcacatgttgaaattctaaccttcaatgtgatggtatttggaggtagggcctttgggacgtaatcagattaggtcatgagagtggaggaggagacattgggatccacctgcacccccactttctgccgtacgtggatacaatgagacaatggccctctacaatccaggaagtgaacagtaggctctcacaagaccctagatcttccagagtcttgattttagactcttcagcctgcagagctatgagaaataaatgtctattaacactggttaatccaccagtgtatggtattctgttacagcaacctgaaatgacaaagacaattgtcttcttacaattctttcctccccacttcttctttaccatataggaaacaaatcaatgtcacagatgaatctttccattctcttctcctcaagctaaatcacatactgccaaacttccctcctcattaacctacactttaaccaattatttattcatttgtgtcaaaagccatgattgttaggtcccctaggattactaggattagggacttctcagcaactcatactttaatgaagtatttcttagcatgttatatgatagtactactcaaagtgtgctctgtgcaccagtgccagtcctcaagagtaagtacttagaaactttttaagcaacctgtcactggcacaacctccaagacatcatcagtagataatttttgtagaatgggacatagaccagtttggatctagtcaaatttgtgtggttaagttccatgaatgagctgagggaccgggtattggcagcaaattgagatgcaaaaataaaactgatcattcagaaatagtttgagaagcacatgttgaccagtctcttgcatcagaatacctgaagctcttatttaaaatgcagattctgggcctcatcctactacctaatgaatcagagtctctggaggtagggctataagatctgtgtttcaaacaagcaactgagatgctccctcacagtaatgtttgagaagcaattagttatgtcgatttgaacatagttttcaaagattccattcctgtttcagccatttaaaatgattgtccttaagggcagagattgcatttatcaccaagaagtacccctggaaacccacctccaacgcttgggaaatgtttcaaactccatatactagtgaagccacatcctatgtgtgtacaaaaaagaactcattgtaaagagtttttacatattaacagacagtaatgcatcgccccctgccctgcagtcaaaatctggagatactccttcttttaacatcattttatctggagccattcagtgaaggggcaaacaatgcctcttttactatacggtcaattataaatacttgtataattgtctatactagactatactagtctatactagactacatcatagtacttaagattcaaggtgacatttgtcataaatataaaggctaattatgttccctacattctgtttaataaattacattttacagcaatattacataaatggttaaatggttaaattcttgaatttgtaaatggtattaatctggagttcatgaatagggaacatctcattccctgacagtgtcatatgaagcagtggctctcaaacagggacaagcattagaatccactgggggagatcctgaaaaatgcccaagcccttcctagccttttttttttttcaggaaatagagtcacaggaatctgtattgtcaagttctccacatgactgaggtgtgcatgcagattttggaaatcactgaattaataacactattcctataacatcatcatttttattagaggcaggatcttactctgttacccaggctggcctcaaactcccttgctcaagcgatcctcctgccttgacctctcaaagcactgggattaaaggcatgagccactgtgcccagcctatcgctaaaatattgtaacccaaatattgaagttctaatgagagaattgtgtctggtgggggaatcaaagctctgagaaacatggatgtttgataattaaatattacataaatagtatgcagcaaaatatgtaaatgagcatctgctgtttggtagttaacacagcgggacatttaatagggctgctacctctatgatcctggggactgtgtgcatctggatatctacaaaatgagcaaaaatgctgactgcagtcgcctttgaaaagtcaatcagcactgaaggagagagtgaggcaattcaggtaatgagcgacatgaaaaggaatctcattctgccatgctatgtatcctgcctagaattgtacaccctgagttctgcaggctgcatccctggaaagaacaagaggagcagagctgagcaggatcaaaggcgcaggatggaaggcacagatgccattaatggcagcctctggttatcaagtctggaaaaggccaaagccaaaggcactgcaggaaagtggaacacagcagcttcttctagagaacatctgctggaggaggaccggagagcagcatgtatcatgggggagtttgagcaatggcttctccttgccagcaatagcccaggggcttgcagagggttgggcgacagtgctccaccgagtcccattgggtgtgtggttcttccatgaggtaaaagtgatttcttttcctgaactgcccagcagatgtaggatctgctgaaaagagaattcagtttcattcaaccagcataatcaagactgtgtctcaggctgatgataaggaaatgaaataaacagatcttgctcccagagttcccagtctgtaggggaaagcagacataaacagctgcctcaaataaaacaaaaagtgttggtagagggttatgtacagagttgcagggcccatccaggaagcagcagttcattctgcctggggccttggggaaattgacaaagtgatatttgaactggctcttcagggatctgtgggacttcaccaggtaccaagcggtcagagtaagatggggaggaaaggagggatattcttggcaaaggaaatagattggctgtttgtggcatgcccagtaattataaatattctctgatgtggctccaatataaaataggactatgagcagagcaagccattgatatcctctggttctggttctgaggatgtctctgtcttcttcttggctcattcatggaataaaaaagctggagttgaaaggaaatttagaaatcatgtgacctgatgtcatttaaacttcattgcaacccgttttaatatgtagattgtatacacatacactcacctgggaaacatttctcaaaaaatatacttgcctttgcaaagcacaaggcattccaatactttcttttctagtctatttcattttttaaataatggctttagacctcttgatggatcacaattctcaatttgtgaaacacttgtcaaaggcaagctcctcatttcatagatgagaatgctgagacccagagaggggagctggcttgagcaaagtcacagagaaagttagtcatggaacctaggtcccatcagggttttctgacacccagttcagcacacttactgctgtgccacccttttttcaaccttcagaatagagaagcatagtcccctgtgggtatcaggtttggggaggctgctggctggaggtgcccagagctagcccttcccctggttcctgccccagtgtccacagtagtcatggaggctcaggtgatttgcatgacaaatacaagacagatagcagtgctgtcctgtccacgtttccctttggcagagccctgtgcttctgctctgctccctggtattaattgtttgagtaatgtttgagaagagaagaggtgacagaagggaggcaggtagtattgtaaatctttgcacaatggtgtttcaggattctagagtccttgaggagagggtcacaggacaactacattaaaaaaactttcatgcattcagatatgctttgcaaagcctccttcagccaggggctgggtattgagaatcaaagatgagtgagaggtgatctttgctcccaagcatgtcacagttttgtggggaagagaaatatggaaattggtcattttcatggagaatgacaaatagtttaagaatagagcatataatgggtgtacagagggaaatatgcagcaactttgcctggatggtaatgggtgagaaggtctcacacaggtagatgaacctgggtagcatctttaaaaagaactaggcttttaccaggcgcactgaatgtggaaaccctctccaagcagtggaaacaatagtcaaggagcatggatttggagggattgatgagtgactggttctgtatggaacacaatctgtgtgggctgagaggacaggcagaggacgaggtggaatgcaaagagtaatccagaatgatgtgcacttgatcacgggagtctgctagctacccctgcacacctccgaggcacgtgtgaaatactcggctttatggaacaattcagtgcctttggatgaaattgttccctctctctctcactctctcccttccttccatccttcctttgtatctttttttctttctctttctctttttctttcttccctccctccttccctgcctcctgacttcctttcctctctctatttcttccttcttttcttccttccatttattcatttttctcttcctctctgtctgtcatttttctcttcctgtctgtctccttcttggggtttattattgctttttttcagttaattttggagttttgggggtttttttgtctgtgtgtgtgtgtgtgtgtgtgtgtgtgtatgagacagggagagagggagagagagagttacatcacagtgaactgagtcagaaagccttagatcagtggttctcagccagacttagttttgcccattccccaggaggcatttctgattgtcaccattggggtggtgagaggatagtggtggtgttactggggagaggaggtaaaggcacgggatgctgctaagtatcctgttactttcatgacagcccctacagcaaagaatggcctggcccaaaatgtcagtagtgcagaagttgagaaaccttgatttagactttaaaaataataatatccatactatctgtcatccactgagtatttattctgtgcccaacatagagctaagactttctaaatactataatatatattcattaaagcaaccctgcaaggaggatactattgtctccattttacagatgacttctgtcaccttgcccagggtcacacagccaggactccaaccaggtgtgtttctaaaacctgggttccaataacctctgccccacccatcccttttgtacctttgtaaatccatggccagtgataccagctctgccctttcctagagttgtcatgaggacaacagtaagtgagatgagtgttgtgaaagcagcacataagctgaaatgcaatttatgttacatgtgtacaaaggtaagcatggacctcagatccccttaccgataaaacagagacctcagaactgactgagctacaaaatcccacctggctctcaaacgctaggctttgcggattgatttcactgccagatgatgataacaccaaattaatctgtgggttcattttctcttagcagcttggatagagggttggaatctgaaatcccaatttctgatcccagaactgtcataatttaatcatgacatgttggcaagtatttaccttttctgggaagtatttccctcatcttctcacttgggaataataatatttgcttttcctcaaaaatctcatcttgaaggccgtccagtcctaccaatttctccctctggattttgctgaggagtaaatagaaaatccaagggagggcgcctgagaatgtataaagtgaaatggttatgtttctgtataacaatgattgttattgggagccagcttaggtaactgaagcagtgggcattttcccaggaatctactgaagagagacacactgagaggtttttacagttgaaatactacttcactctcatactgtccccaagaacatcatggaagcttcaattttgcatgtgcctcaacccctgtaccaaagaaaatcatataatccagggggcaaagtgctccatttctttgatgtcagggatcaagtgcctggatttctggatgaactttggtggatgttggtttcctctcaccacagaagccatggcagggggcagctaagttgctgaaagaacccaggagtttgggcgctggctgggctggggctgcagagcttgaagggtgggcttgagttgcctgaagtcccaaggaggtttcaaggtgcccaagaacttaggaagtaaatggagaccaggaattctgcccatctagcttggtggttttagatcttgtcaaaatgctccatccatgtccccaaaaaaaggccaatcgctagaccatcattcatttaatctggatagtttttggagggtcatagcaatgaattttacaatgacaggtcaggtaaggtgatatctgagtgaaggcagagcaattattcattcccacagctttagggcctggctctgttttctttatttttaaggggctgtgtttaaggagcttgttgggaaactaagctacagtcaaaattctttatttcctgatcccaaagagcccgctagtgttctctcttatcacacctttgagctagtcatccagggggaattgctccacattatccaaacttgccttttctctcagtccacattagccttcttctggcagtctcacacctggcccctcccctgtgttcacctggtaactcctactcttttctttagacccaagcagtggttcctttgaatagctttctctgaacttcctgccctcaaacgcattcactgtcactgcattcctatagcaccttttttaaattattttttaaatatttttatttttttgagacaaagtcttgctctgttgccaggctggagtgcaatggcacaatctcagcttactgcaacctccacctcccaggttcaagtgattcccctgtctcagcctcccaagtggctgggactacatgcatgcgccaccacacctggctaattttttggttttgtttttgttttgagatggagtcttgctcttgttgcacatgctggagtgcagtggtgtgatctcagcctaattgcaacctctgcctcccaggttcaagtgattctcctgcctcagcctcctgagtggctgggattacaggtgcacaccaccatgcccggctaatttttgtatttttagtagagacggggtttcaccacattggccaggatggtctcaatctcttgacctcgtgatctgcccacctcagcctcccaaagtgctgggattacaggtgtgagccacggcgcctggcctcccatagcactttcattacatgcctacacgttgagtcatcttagatggcaaccagggcttttcttctttcgactcttcttttctccttgcattccttcaccagaaacttcatgtgtttaacaaatgcttagaacacacttactatatgataaccattgcaaacattggatattcaaatccccctgataaccccatgagaagagtactattgctactccatctgattttacaaataaggaaactaagtcacggagaggttaagtaacttaaccaatatataacgcagctagtacagggcagaactgacgttcaaacccagactccagagttctggcaaatgaacaacaactaacaatcctaatttttctggagtaacaggatatctccaaagtactagaattagcactaggaagaaggttttttattttgtatgtacaaggaagtatggggaacaaaagcaaaatattacaatgttgagataccatcttgctttataagctgaacctgtttctcggcatctttctgaattctttcagcaaacaggtatcagataaataggagtaattttgtaagccactttcttccaagtggctcttggttaaggccattctcccctgaggtctgtgaacaggatcctgaatgactaacatttggttaatcattaatagagtggttaacacataggctttaaagttcagatgatctgggtaaaagtctcagctctgcctagctgtgtggtcttgggcaacttgcttgacatctctgagtctcagattcctgatttataaaatgaggataatcactgcatctaccactgtatttatcagtcagaatgagcttatgtcagagtaacaggcatctcacatttatcagtggctcgatacaaccaaggtttgtttttcattcaaacttatgttcactgcaggttagcagaagggatttgcccattatggttactcagggacatgggtggatggagcctccatcgagacaaatggttctccacctcagcactattaacattttggggccagataattctttgttgtgagggaagtcctgtgcattgcaggatgtttagcagcatctctgacctctaccgaccagctgccagtagtaccacctcccccgtggtgacaacccaaactatctgcagaaatttccaatgtcccatgggaagcaaaaatcacccctggttgagaatcactgatttacacatgcactgccataatcagaacaatcagaatggctgaaaaaaaaggaaaggttgaacagaacaccggcaatgaaatgctcccacatgaaaatgacatacttgcttttcctcactttggattgactaaagctggccacttggccaaacctaacttcgaggaggtaggaagtacagtattaatacaaattgggaaggggagagctgaaatacctgtcaacagttctaataaacaaccatctaaggctgctgagaggattaaatgaaatactgcgtgtgatgtgtttaacacagtgccaggctaataagaagagttcactacttgggaactgttgatattagaacacaatgcagggctggccaggctgggaagaatgcagctatgggtcaagctagctctaccaacagctccttcatagggacatagaacttgcacctcacttgtcagagctttcttttattaaaggccaggagaggttggttagtttgtggtgcttaattgcaaagagtgctcttattaaccaatattgttggccagttgaagattcctgttattatttaacaacaacagcatcaacaaagaacccgactgagccctgcctgaaagcggtccagcctcactttaagctaaccttcttcttactcttgtgttctagccactcgagccttcttccctgaacacaccatacataccatcttttctagctcagggtcttttatttctcctgtctagaaggctcccgtcccatttatctagttaattcttactaatttgtttacttttcggaaaagcactcctgacttctcaggctagatattccctcctccaccctcactctaataaatgttcatagacctgaagcctttccttcatcacacatcacaatttgtaattatatatttgcttgtgggactagtcgattagtgtctgtctcccttactggtttccaaatcagtcatgactttttctcttttgctcgccttataaccccagggcctttcacctggaatataataggctctcaataaatatagattgattgaatgaatgaatgaacaaatgagtgaaggcaaagtgaatgaatgaatgaaggcaaagtgaatgaatgaatgaatgaaggccaagactaaactctgggtctactgatacctgctttgaactccttcctttaaaccatgctgcaggtaacaatgtactcaccccaacaataccttttgcaggaaaggaaagttggaaaaagtcctaacctaaaatgtcaggtccctcatttccttgaggacactcctagcagaaggtatgccacctgcacacacagtgaccaagtgcctcaccccggcatgccaccacagtagctgtgtttgcacagagctcccagttcctggttgggaaccatggtgaaaagtctctaaacagagctggctgggcagcctcaagctggagccctggggaacagcctgaaggctgggagcactgacaggccgcttctgagccccaggtggtaagtctgcccttctttctcaggttttaggggtagctcttggcctcattcatctggcccactccccctgccccttaacagcctggcagctggcctttcaaacttgaatggaaatccattttcttccttcctttaacctggagggaatccaaatctcttccccactggcttggggcccattcacacccatgtgctcacctccacctccagtaaggagtgatcactttctccctggttaactggaccctggtctgcagagaatcagatgctcattgcatctttcccaggcacacatcaattggacctgctcaaatgccacttactctctgcctaccacctctctgcctctccttgtgtgcctgtgagtctctttctccctttgaaatatgatcatactgctttttgctgaagccatgcatgccatacctaaatgtaatacaagtaaatatttaagacaaaacttctcataaatggcaaaaaaaaaaaaaaaagatttgctgtagtaaagctggattactaggaacaaatcccttggtacaaatgtatgctggaataaaaacatacaaacaaacccccaaaataagcatcttaggtgacatctcccatagttctaaatttgttaaattacctgtttggggtatgtaaaaatgaaaatcgatggtgttggtcagaaagaaaaagtctgataattaatgctaaagttattaggtaactagctaacataattataaagtacatctttaaaaaaagaggatggcaaaatactggtggcataactcattgagtttattccattaactctgaagagcacttgaaatcataacgagcagaatggctgctgttccagcggcacagcctgctgaaccaaggacaaaaatggtaatctgagggagaaatctatggtctgaatcaagagtatgttgcctgggctatatatttttacttaagtgcatggcaaaattctcaaggggctagctacagatgaaattatcttcaccttatagattaaatttgttcatgcaaggctttattgacaaaaaattgttatagtgatataaaaattattcagacatttagggccattgctattatgatgctgtcttttattagagcaagaagtcatttttaacagtccaggaagagttatgcattgtataattccagagcttgttcatggctaaaaaccattctaatatcattcctgagggagttgacttacagaaggatggcctccctccagaatggtgaggaagtttagctgtggtttctactttaatctgatttactgtttatgagtcataatgtgaggatctagtcgggttacaactaaaatcaattttatccagactctggtcttttcttttttctcccatttttgatttttaattactaaagtaatacttgattgtaaaatagccaagcagaacagaggtataaagagtaaaaagtgaaattctctttctaacccatgtatccaagccaaatctattcccttccctctctagatataaccaccattggctggataatgttttctaaaaatgaacaggaacacacacatggagattatatatgaaaataaattcacatggggttagattatcttaaacttttaaatagaatcacactatatattttggtctgcaacaagcttttttccacttaagaatatgtcgtggagaactatgccaatatgtgtagatacaccctaatttcttttaaacattgtatagtgttccattctatagattgcaatggtttatttaacttttcttctattgttagagtttagatggttcctatttcttcacaataacaaatatgtatcagatatatatacacatgcatacatatgcatgtcgatatgtgtgcatgtaattgatgtgtgtatgtgtgtacttctatagcatttctatatgacgtagtatttctgtaggatgaatttcccaaagagcaattaactgagctaaatcgtatatgcaacttaaactttgatatcgtcaaagatactatcatgtgaccttatgaaagtgctctgctaatttacactgtgtgatggtgtgtgtgatggtgccctttttgccatgcattcactccgctagatattattcatcatttcatttttgccaacctggtgggtagaaaatcacatgccaatgctgatttccgctgcttttccaaggttgggagtgaggtggacctagccttatctttaggatttttgggtaataaaccttcagatgaaacaaaatatagtcattgagaactgtacagaacccaaaaaatgaaagaaaatgagaccgtttaagctcagaactgcatgcacaatgaaaaggagccccaggctgacttctttaatgaggcagcactaattatgttaaaagttagcaagataaaagaatggaaagggcccctatttagcctgttacatgctgtgtagaaaacaagctggtgaagtcagactgtacaagctttgattgaatatctggacatgtactgtggaaccatggacaagttacacaccttctgtgtatctcaacattctcatccgtaaaatggaactctaatgttgtcattttcttaggactattgtaatgaggcagtgcatgtgtaatctttggcacggtgcctggaaaataaacattgggctctacaattgttaaccataataatagtaaacacaatagctagtatattactattgttatcataagtcaaataggcagtcatacacccacagggagaaatagagtctttgagcagtgactaagtggcaattgagaaggtcagatggatatatgattaggagagatagatgttagagggaaattcattgatcctttgtagagcagagtccaattagccagaggggaatgattaattatcttctaattgcaaactaattggacgtcagaacagaagaggatcttagaggccatggaatacaaaaatttcgttgcgtagatgagaaaccaagactcagagagaagtgactttacctaagattatacagctacccaagcaagagaaccaaaacagggatctgtgcctccaactgcaagtccatgtttcctccatattcatattttctatattactcttcatcttttagttaaacagagaaagatataatgaagaatgagtctgcaaaagcacctttttatttcttgtttctgattttggatgacagcttttagaaacataaccaagttaagaacccttgcacatcaataaagaaatgacacctcaagataaaaatggaacaaagtgaagaccaggtaattcacagaacagaaagtacaaatggctaacacacatgtgaaaagatgctcaactttgctagtaatcagggaaaaacaaaacactagtccttcgtttatgcagtcaacaggaatttttgagtgcctgtaatggactagaagtggttcatttgtcatcatccagattggcaaatattttagagcataacatcaagtgctggtgagagtataaggaaataggtactctcaaacatagtgtgaggggtgagaaattaatacatacatttggaaagcactttggacagctcttggcagaataatgctcctaccccaaaaatagccatgtcttaatccccagagcctgtgaattcactgggtcacatggcaaaggggaattaagtttacaaatagaattaaaattgctaatcagccgatcttaaaatagagagattatcctatattatccagtgacagccaatgcaatctcaagggtccttaaaagtgaaagagggaggcagatgaatcaaagtcagagaaggagaaataatgacagcaaggtcaatgtgctttgaagactcaatctgccattgctggctttgaagatggaggaaggggccatgggccaaagagtatgcacagcccccggaagctggaaaaggcaagcaagcagattccccctaaagcctccagaaataaatgcagtcgtagcaacactttgattttagtgcagtgagatccatgtcagacttccaagataataggttttgtattgttttaagctactaagtttgtggtaatttattacagcagcaatagaaaactaatatagttctattaaaatttcaatggaaatatattgtgccatttgtctcagcagttactcttcttgttattaccttggagaatcactgtgatttgtatttgaggggccacagtcagggatgtctgcggtgacattgcttgtattgatgaacaattgcagggacttcagcatgttatccatgaaatgggatagtaagcagatgttaaagtgaatgaagcagatctgtaagtactgacatgccaaattcttcaaaacaaaacacacagaagaagcaagttggagaatatcacatccagtatataccaatcatataaaattgttactctcacacaatgaaattatatatgttaataatctatacaggtaaatggaaggatgcatgccaaataaaacagtaataaccatgcagaaaacaaacaaaacagttataaccatgtggaagactgttgagtttgaaaaatttattccttatataattttaaaacaaaatttaattgaaaaataatgagagatcatctgaagactcattctccccagctcacatatacctctcctttgctttggtccactttaatgcaaaaggaccttgtgctaacatgtctgggaagaaaatgctccagcatacaggagaaaggataattttgaatgactgaattctcactggggctagaagtcacaggactctcagttttcttagttctagcaagcagagttctggttctcttgagcccctggtcctacaggggaacggccaggcaggaatcaagggtgcacagtcaaggctttctagcaccttccctactagctatcctattacattttagaggacaacactgaatgttccatttcccaaatatgcattaacttttttgtgcatagagcactgcagtggccaatatggggaatggaaatctttcataactcaattcaaacatcaccacctctccaaagtctttcctgacatttcccagccatgtccccaggtagaaccgagcatcctcttttttcagctttcttaatgttatctatatttatactgaatgctagattgcattcattgtttttacatatgtctcctcaactagacatacaatctcttgaattcaggcataatgctttattctttgtggtatttcatgccttccagataatagggccttatatagcaagtattggattattataaacaggatgtacctttttacactcaaaggatttacaatccagtggataaacaaaaggtagtattgtttgcatatggtttgtttggaccttccaagtctcatgttgaaatttgatccccagtgttgcagatggggcctaatgggaggtgttcagattatgggggcagatccctcatgtctggcttgatgtcattctcaagaaagtgagtgagttctcactcttagttcccatgaaaactggttgttgaaaaaagcctggcacctcttcttctctcttttgcctcctctctcatcggctccccttcaccttccaccatgagatgaagtaccctgaaggctttaccagaaacagctgttggcgccatgcttcttgtacaacctgcagaaccttgagccaaataaacctcttttctttataaattacccagtctcaggtattcctttatagtaacacaaacaggctaagacagaaggcaagttaaaacaaaaaagattgcattaagttaaaatgtgactttctcatgatagatgtgatggttacctttctaggggatggtgactgcagggagcatgaaggtggcttttggaatgctggtcatattctgttgttttgatctgggagttagtaatacaggtgtgctcattctgtgaaaatttatcaattatctgtatgtatgttcttcttcaataaaaaagttaaaaatttttcagctcctcagacaggtccatcttgaccactttatctaaaatagctcctgttcttgccttattttccttatttttttcttcataattcttgtcaccccatggtattatattataaatttatgcctttattaaatccataaggattggaccactgtcagtctttttcatcaccatgtccccagagcctgaagtggggccaagcacatggccctcaatgactatttgttgaattttctatgaatacatgtagtgacaaggaatgaagtattgacttttgctcagtaacatcacaaaggacacctgattttagttgcatcattaggagactattcttatctaatggatgaaaaatagaaggagatagattgtgagctcacggtagtcatcattggactgcaaaagtacttaaataaatgtccttaaattttccctccaaatgggatgggccacaaaaatactacccagggcatttgcaaaatctaattatcttctagagaagtttttactgagtaagaaatttgtctcaagaaggcttcaaatgttgatttactttaaagttaggctttctgttctttctcatgatctaccaattacacaggagatagccaagacgaaaactggaaaaggaataggcaaagacaaatagtatcctaggagggcaattttctcagactcttccgttttcttgttctgtaaggtttcttttaagctatattttacaaactgtacaaattacccatttaaagtgttccattcaatggtttttaatatattcataaagttatgcaaccatcaccacaatccattttagagcatcttcatcaccccaaaaagaaacctagtacctattagcagtccctatccatctctgccaattctccaggcctggctaccagactcattgactttctgattctataggtttgcccattccacacatttcttataatagaatcatacaaaatgttgtcttttgtgactagattctttcatttggtatgatgttttcagggttcatttacattattgtgtttcagtatttccttcctttttattgtaaaataatactccagtacgtggatatactacattattgtatccattcatcagttgatggacatttgtattttttctacttctcagctattatgcataatactacaatgaactttcaagcacaagtttgcgaggtcatatgttttaatttcttctggatatacatctacaaggggaatctctagatcagatggtaactctgtatttaactctttgaggaactgttttctaaactgatctcaaaagtagccacaacatagtacatttccagcagcaatgaatgaaagtttttgtttttccacatagtcttttaactttcaaatacattttttgtaatacctgatttgcatataaatatctgtcataaaatcaaatgggtacacttatatcttagaatctgtgatatttacttatgtcccttattagtcccttactaatattgctgctgctgcaactactgctgctattgatgatgatacatagcatttattaaggacttatgatattacagtcactgttcaagtatgttacatgtgttaacacacatttaatcttcccagcaatcctctgaaatagatagtatagatgagaaataatgataacttgtactggtggaacagtagtgagatattaagaagcgaacatattacatcatttatttgtctatttactcagtccacaatatttattgagcatgcactctctgctaggcataccgtgtagtttaccaagttgactgttatgagcaaaagagatttggtctctgtccttaatggatttgtaatctattgatttgaaagatatttaagaaatgaaatcaagatgcatttttgattaacttgatatagaaagtgatgcacaaaaaggtttccagtttgggcaacaggaagacagttgtgctattttcttaaggagcatggaggttcgaggaggtgaaaaggtgggtataagacagaaaaaaatatgatttctattttgaacatgttgatctttagggatctgtgagacataaacagttggaaatacgggtttggaatttagaacagagatctgctcaatgtataaattttggagtcccatagatcactgaaatcgtgggcacaattgcctaggggaagggtaaaaaaatgatgtgataagaccttctaggactagaccttgaggaactttgacatttaaagacgagttaaagaaagacaaggcactcaagaaacaagagcttgtaatgctcctgaagtcagaagaaaagtgtatttcctggaaaagagccatcaacagttgtgaatgccactcagaggcccagaagggtgaagatgctttggattgagaggcctggcggttattagtgactttctagacagctatgtggtagggtagtgtgggagagtacaccaggccagtagaacatgatggaatggaggcagaaaaatgttataactctttttaaaagcttggtagagaagaatctggaatagggcagtaactagcagggaaagaaacatggttcattttgcctttgacagaaaatgctaaaagagtacttatggctattggtaagaattaagtgaagtatgaaagtaatgatttatgttccaagttcaattatactttattaattttgcctgcaccttttgtgtatagactgagcaaatgttgaaagttttactaagcacagggtagcagaagaacatgaactacgtcctggacctgtcatgtatagattaagttatttaatagctttaagcttcagtttcctcatcctacttttcaggattattgcaatgatgagaaatagcatatgaaaagtcattattatcacacctggcacatagacagctcccaataaatggcagcacttattatttcactccacacagctgtgtgatttgtgttcgtcaaatcctttctcaggttttcgttgctggcagggatgttgtttccattaatctaagcttcaaatagctaactaggtttcctgttcctaagcctaattctcaaatgatgcttcattcttccatcatcaacatgtattcattttttcaacatgggtttaccatttcgattacattactcagccatatttttaatcatctactcttgtcatcattgtcattatcattccataaaagggagttccccagcatcaacctgccattcacagccctgggcttacactgctttacttgatctgtttctacatctcactccattctgcccttctacaagccacgttttccactgttctcttatgcctatcctctcatcacccttcggacttgatctatgatattttctccctagagttgaccttgattctttttagaatgattcttatagtctttggcaatcttgggatatgctatcctcagtttaatccaacccttaggatttcttttagaatggttctaatggtctttggcaatcttggaatatgccatgcctaatggaagccaactcttatgactctcctacccaggaaaaatgcccacctgattactgccgcctcctctggacaaagcttggacaagcatgaaaataagagaaaaattgcaatgccaattgatacgatgagtaatttaccttgatagagaacttcctagaatgcactaattgtttcacaacttcaactgtcttcttgacacctccaatgatggttgcagcatcaccttgaattcaggaggtttgagtattacttgccattatcagctccatttcttaagtgctcacttcctggcagtatgctatttgttcttccagtccagactaatattagaattagtcaaaactctaatatcggtttgatacctataacccttgccccataccaccaactctaccatcatccatttagtcatcattactcaaactctttaatgattttgaatttatcgatttttcccatttccctgacattttaacctatatcctagtcttcctagttcctcacttatagcacttagtgattaatcttctcggaactgcactttgatcatatcaccacccagataaaaatccctgtgactccatatatttgaaaaataatgtccagatgtccccatcctaccctttcatctttttaatgtcttcctgcttctttttaaaagatcttattccaagcagcgtgttctacttgtttttttcttggtgtcgcccaggagttgttcttgctttctctcctttgctcatatagtttcactcaaaagcgatcatcttcctcaaggctctcttcagttgaacgtctttcagagaatcagcgccttagtgttaatgattcccattctatgagctaagagcactcagctagcttaatcatgtcctggatgttagtcatgtaatgccttgtgtttgcctgtctttcatttcttagaattttacatctgacagcttcttaaagatgacattatctttggctgttttgctagaggtaaagtgttcattatacggggacttttgctctcttgtgtgtgattcagcctccaccaagaatgtcacatcaaagaaggacagtgaccaaatgaaatacgtacagagggagagtgctaggggaaaaaaagggtgggggagaggtctgaatatgggaatattcagggttggtaggttggacagttgtctccgcatagttatagaaaaatatttagagttagtccatgtgacccagagaataaagggatcattaacattggttatatgaaaatattttagcaatcagtatagcagaaacaagaatcaattagaaaggatattggctgtaggtccaatgtagagccctagagggcctccttgctgtactagacgtgaagcctttggtttctggatcatgacaaagttagacattcctcaggaaggtgctggggttttagggtagcaggggttgctggggggaggtagtttgggcagtggttatctaacactagtacagaggtgctttataactgacaaacattcactagcacctgctagctgaagatcagagctggccagttaacaggttgacattctgaaacttggcataggaggaacctacccctagaattggacagtctgagtagtggctttccgagacttggacagctttcagaaatactaccaacaggaggaagatatagggagatatattctcagtaaaatatcatctaagttttaaccattggagttaatagagcataatgttggcctagaagacctttatggctccttcaaaccttgaaattacagttttataactttatcataacctactttcttcattttatagatgaggaacctaaaaggaaggaaacgtgcctgagatcttctttgttgtcactgttttacttccatatcatggatttgcttttctatgtatatttgtcttgctctctcagctgcagtttacttcttctactccctataatgattagaagcatagtatgtatacacaggatgttaataagcatgtgatatatgaatggatagattgttcatccctgtccacatctcaaactcaggatcccacagagaaaacttcattcatcccctactcccttcttctgcttcagactattggaactcaccactgcttcttccgcccctgaccaaatgctaatggaggtgctaatgaggccctctggccatcagaaagaaagagaaagaaaatcaaatagtctaattaatccacaaattatagtcactgaaaaaaagtggtcatatttcctatagaaagccagacagggactaatgggcactaaagcattggtcttggctcttgtgggtgtgtagtttggaggttacctgttgttttttcagggattatgaggcaccacttggcttccatttgggtggagctcaccagaactctgttccaagtctgagctgtctgtttgcttattaaatggaaaaggagggcagagagtaacctctttgtataaggtgagcctaatattaatagcaaacatttattgagtacttattatgtgccaggaactttactaagcattttccttggaggagttcattgaatcctctaccattatttcccctactttatacacagggaaactgaggcatggacaggttaggtaacgtgctcaaggtcacacaataagtggctaaatatgtggtcagagacattttagctagtgctaaatctaccagctgcattctgtagcccatgctcttgactgtttctgcctataccatgttaaccagagtggctgcatcttccatcagcgaactctgagaatgcagaacagctcctgccttgagcatctcagagagatggggctgaaacatcacagtatgggagtttaatggataggcttgaagatgatggggagggcagcggtaggaatatgccagaaccatctggtgggtcagagcagaaagtgagggagagtgctctgtgacctgtgtgacctgtgttcggcaggtttagagttcagcctctttcaggactcccaaaaacacacagaagattttcactatagcagggagccgcatgggcctttatccagtgagaatgaagacaactgcactttaaattagtattgtaagtgaaaagcacatttaagtgtgaaatcagtaggtgtgctaggttgaaaatctaagaaatgagtcaagaagttaggagtaattaggtgtaaagagagaccttgctgctcatggattaacaaactcaagtttgtttttttctaaaggccttgtgtacattatgtgtgtgagcctgtgtgcatgactgattgtgtgtgtgtgtgtgtgtgtgtgtgtgtgacagagagagacacagagagagagagagagagagagagagactgtgcaagtcactgcaagtctacatgaattatgagaggcattccccagtaggcttagtcccactctagggattcagtaagaacccccagaaggcatctcttctgaatttgggctggcaattagtcacacctgctgaccagtagacgaggggtccatggtgcgcagaaaaccaaacaagtataccaacttttaatctaggcctgtatttaacaaactctaaggtccatgtaaatcacctggggtgtcgagttaaaattcaggttctgattcagtaggtctgggacgggggctgagactacatttctaacaaatttacaaacattttgctggtctgtgaaccacactctaaattctacataattttctctttttatcctaatataatgtgtgtgaatttccacatttgacagataaaagtgctgaggcatagagtactgaatgatttgctcagtcacggagctggtgggttcagtccatgtgtgatggccacagaatccatgctgcttctgttatacgccactgtagcatataagcacattcaagctgcagcttctttgagactcagtgtggtggcatacaaacgtggtccttggtactgagacacaggacaggccccagtgtccctgccggtttactcagcccactgttttcttgggtccctggatttagtgtatgctgggacaggagtctggctttatccactctaaccctcttgttcaggaccccagtcaaatcctaacctagggtttggcccactttctattgtcccaatcagacgctcggaacaactctcattacttttcttggactagccactagacacaactataggccctcactctgccccttggatggaactaatgaattagaataccacttggaatattctagagtaacaggcctgcctttgggattattcatttgccattaccaatcacaccctcaaggggccagcccttttctccccatatttttaacccatgctgtccttggttctctttcctggtctccgtgtgacctcctgacatgcctaatggcaaggtgacactatttctgggatggtctctagcttcctggggctaacattttggttggggtaatgaatgcaaataaccagtcacttgtctctctgctttgctcttctccccactcttcccatctttaaatgcataaaacctgaggaatctactgcaaacaccattttcccatagaacctttcctaatcacctcaacttacattgacctctcttttctctatacccctctgcccaacaacatcttcctttcatgtgtctcataggaattgacacttttgacctttcactatgggcagcctgagctgtgacttcccttgtatctttggttcctcaaagggagctccaaatctggttggtcctcctatctccagcaatatgctttgcacattgtatgtgcttagtaaatggctgttaaatgtatgaaattattccaagtgagactaatacttggtataatgaaggaacaaaaaccaaagaggtggaagaacagttgaataaaaaggaacctgggaaaaaaggagaagactccctgaaggtctcatagaagaaatgagattgatctctcttgaagggtgagtaggacttccatagtgggattactaataattataatgataactaaaaggtattgtgtgcttaccatgttccagatactggctagaccatgtgctcattttatcctcatcatagccctgtaaagtaagttgtttctatgatagtttccattttacaaatgaggaaacacaaggaaaggcacagagaggccagttcactttctccaggcatgtggatcgttcggtaataaagttatgatttgaatccatcactggaactccacagcacacactttgaatactaatgttctaagtagagatggaaatgctccaggcacaggtaaagccatgagcaaaggcaagacaagagagggaagcagcaatgcaccccacacagcaggggcagacaggccggcaggggccaccatggtgccagacaaggctgggaaggtggtctggggacagtccggggtcatgttttcccttcatgagaatgaagactatgagccacagaaaagaaataccgagtcaaatttgcacggggaagcattatttatgtgctgtctctggccccgcccggggctgctgttgtgtggggaacgaggatcccagccagtgcccctggactgttctgtgggccaaggagctcactgcaaagtcacactttggagaataaagctgctggtgatgcccagagtggcccaaataaaagtcaaataccacattcagtcctccaggggtgtttttgctattaaattaagtctggaaaataaataattgtctttggatttgatttgagagatttttggtcattgaacactcaggaaaaaaaaagggggggctatttcttgaaagattccttgactggctccccctgccagacgacagcggatcacaatgaaggcatgctgtctgcaaagagatgcttttctcccccttcttgacacaattatcccagaaaaatagaggggggaggggaggcttcgtcatatgttccaatttttattgctacattccttggatggctccatatgtttaccttttgctgactttagacttggtgttctctgtggctgctggcgtcggccacagaattctttcatgtctattactttattaaggaatgtaaaagccacatacagaccgaccaggggacacaacagtaggagacacaaataaccctgaatgcgctggcaaagaggaggcttcacacctaattctcccagatgatttgtaaggctctccaggaccaaaagggggcactcttagcacttgctcccaagcccaatcaataataccattttgataagtaaaatagtgcagaaacagcaccaggctttaagattggtcctgatgaaagcagaatggggtgaaagaaaccaccctcattactagatatttaaattttttttctgacttttcatcaactagaaatagaagctctaaatcatggggagacagttaaaattaaatgggataaatgcacaaaaaattgctttgcacaatgccttggcatatctatcataaatgctcaaaaagagtagctattacatactcaacttttactacctcttaaaaggggcactgaagctaggtccagattggctcatagcacaagagtgtaatcatgaaatgggtctttatattgaataccattagaagtgagggctaacaggtaatcactcaattcctacagtgcaccgagcactttgcataaattatcttgttatcatgattttgtagataaggaaattgaggctcaggatgactaaatatattgtcctcatatgtaggagaggcgggatttgaacctaggtctgtctgattgattccaagcctgagcttttccttttttaaaattttattttactttttgagagactcttgctctgttgccctgactggactgcagtggcacggtctccgctcactgcaacctccacctcccaggttcaagctattctcctgcctcagcctactgagtagctgggattacaggcatgtaccaccacacccagctaatttttgcgtttttagtagagacggggttttgccatgttggtcaggctggtcttgaactcctgacctcaggtgatccactcacctcggcctcccaaaatgctgggattgcaggtgtgagccaccgcacccggccagcctgagctttttctatcagacaaaaaacacagtttaggatcttctgctcataatgcattagtttctcacttagtctcagacccccacaatcactttaccaaagcctgaagccagtgccaaaaagctctaatcccttgtagatacaattccatttctattcaaagatcctaactaaaattcttaactttttcagcaaagcttgtttgtggagaaaggaagaactgggggctaggtagtgaaggtaattcctatgccatcagcctccaaagatgtttgttggtatctggaagatccttgcttgttttcctttcaatgagtctctccaggcttctgcacctgctatgtaatagcaaaactattgttatgaaacacaccaaaaccaagtcctcaaacttcacagaagaattcactttatttcagcaccagtcctctccccttttccttcccaggatcttcactcaacttgaagatttctgctttcataggagtttgtagtctgcactgtaaccacccaatacatcgacaggttaaaaaaagagagctcttgctcagaaagagctagaaagactgtagagcctaaggggtttgtttttacctccctcctggaagccaatagccctttttttttttttcctgggaggtgctcagtgattaagagtaaaaatgctttgacttgatatgcaatggaaagacgggattctttgctaagattacaaaatgtgtttgctttgtgattttccttgcaatcctgaagtgggtgaaagacttgcaactgaaggatgttttgattatcaggagtgttgccccttagccaaacgaagaaagccttcaatctcacttgggattgaatgttctttcgttgagtataggagtatagggtgttctgttctgtaacaatgtcctggtttttagccctgcaaggccttcaggatcttcagaaacaacatctctttccatctctgcgtcactggtgagactttttataaaactagatgctctttctaatgagagctggctatgtgtacctaatgtttgcactggggcagtatttcccaaggcagtagtaaaggctctgagaagtcctacagtaaagaaacctatgtcactttacttaatccagggattctcatatatatctgaccacagaacccttttagctaacatctattaatatcccatggaaacagttcgggtataaacatataaactcttggaactgcttagaagggataacctcaacttattgatggatttggatagactatttaaggcagaactattggtcacatatttgggataaacactgaagctgcctgcgtggtctgtctgcattatttttagatctgtgtaagtatgtgtgcatgtgtttatatatactacatataaatatacattttagctgtgaggttagaagatgaggagaaaaaaggagaagatactgctttttataaagaagcaatcagtgtcttgcaggacaagggaaaaatctattaattttaaggcatcattggtaccttctattactggcaggctctggtcacaaaattagcatcatgtggcttcctataatgataaaaacacctagactcctgttctgcatgaatgccctgacaattggagatgacgcttcttctcatcaacctcccaggattctttttattcagcccagtccactcttcagccccaatgcagcacccaaaacacttctttcaaagtcaatgatacctatatgatatactcactggtactcttttggaggatgcattaagtaattcagaaaatggtgtagtcttattcaatgttgtgatctagtttttatttccagagcatgtttgaaaccatctaaagaaagttcttagcaaaccactccataaaaaaaaaaaagtacaatgatatatatttatttaattgtggaaaagtcatgggaattctttttaaatattttaaatgaaacataaggttactttctgaaatagaactttacccatgtatttttttaattgtcacatatagggtgattttaaagtaaataagaacacaaggttcatattattttaaatgtatattgtatttgtcttctcaacgctgtggtttttaggtctgtgaatagcatcatagtatggagccagcctattaagcagcctgtttgggtaaggaaagccttagaccagcacaatgttgtattgctcactgtgtccttccaatatggttagaattccacaacctaaatgatcatttgttgaacaaattcatgcttttattagtcaaaatacagagaaaacagagcctccctgtttcaagatatttgctaatgcatggttaattatcacatatagcttactataattcattttacaggggagacctcctgcaggtaacatactagcagtttatgaaccaaaataacctcgctatagattagagccgtcccagggccgctcagacagttggtgcttctagaccttctcacttcacattgctaattcgaacaaggctttatttttatatttgtcagcagcaagactgtaggatggttgttaaacctctcccaggcctaattagagcagcaatgctcgcattcataatgaagctcgtgtcttgctcaggaggcagtgatctgggctgttacagtagcttcctggcaggccctcgctggcagttttaaggtagctagtggctgcgatattaagtgactgttgaaattcattgactccaccacggctaatgtgtctagatgacaacaagtttacacggttcttttatagttacagcaaataggtccatttaaatatttattaggtgattatggtgatgtgaaatggaaaaaaaaatgcaaagtgcaatatctcaagtatggctgtttttaactgtttatgtggggtccggatcatggtatcactcaaaatcgctgcatctttcccttataaatatttatactagatcagcagtgatgaatgctaatttatttgcattttgtttctttattgacttctccctgggcagaggttagctgtgaaaagtcatgcaggtttactggattgaaggatatttcgatctgccaaccaaggggcattttgattagatggggggaggacagttcactttgctgaaactgaagagccctttttgctcttggagatgcagcctgagagtgtattcaggcagctggtgttttgccctctgtcagagttgatgtgcacactggcaagcagttttgcctccaaaagactgcttttctgtatagcaacttgtcaaacctccttggactgaattgggtgaggctggctgatctgggtgtttgtcaggcttctaacttgagtttttttttttcttgttctgtgagtcacttaaaagattacattttcacaaaagcaaaaaggcatatgtcttaaattgaatggggcatctgagacaaagagaggagcagttgaaagaaacccagctttgtgccgtaaagactaaaccagtatgataccaaagagctcaaaaaatctgtaggggaaactgtcagaaaattccaggcagataaagggcaaatggaagttgtcactttgcaattgaatattttgactctctaggtagctagaacataagatagtgattcccaatacaccatccataatgctgtttattattttctttcttatgtcttgaaacaaactgtatctgtatagcctcaatatgtgtaaatggagaatattcaggaggtttttagaagcagcttttgaaataacccattactacatataggatgccctggagatctgaggactgtctaaatgaaagtttgcgtgaagcacttaaggccactaaatcagaaatctctgaagccaccataattgtttcagttggcaaaaataaaaaataaaaaatctctgactctaatttgtatctctttttacaaaatgcactcatttagagtttggtctgttctagtggagcccagtcttgaacctgttccaaggacattaatcacccaagaatccagaactatctcatgatgtgatcaatagtatgtccttctggacacggatgtagcaagaattcaccgcagtgtggttctacaaagtcaggctatttaaagagatttaaaattatgtgggaatctcactattaagaaaatactatggtcaggggtggtggctcattcctgtaaccccagcattttggaaggccgagacaggatttcttgagcccaggagtttgagaccagcctggacaacatagcaaaaccctgtctctaagaacaatttcttttaaagatgagaacattatagtgaatctttgatcatatgaagactcctctgaggaatagaattattctgaaatctacaaatgtgtactctaacttaagaatcgaatcatatggaccctcaaattaaaacttgtaatcatgaattcctttcaatgtaagaattcatggcttcatttactgttcacagttgtagctatttgcaagtgactcatgataggtagttcgtgatttctttttaatttgaatcttctgagctacaaagatgatgtgcagaggctgatcacttagtgcaaacaaaaacccacatcttagtccagcctcgttgctctcaattaatataaaagtatcttttaatcctctcagctcattgaggatgcatttactctccccatttgataaatgaagaaacatgacattaaagcaactttggtgctttttggagatctcaggtctgtttgagacgtgtgacctggcatggggcagtgctcctctgcatagccatatgtggccacctgctctcagggcacctcttgcaaatgtgaaggccccactgtaataagttatctagtatatttcataagagattcaatctaccaatattttctttattcacaattcttcaattttataaagcaaagactgtctctaatgggttttcctaaaatcggaatatatcaataaatcgcaaacagagtaggtcattgggaaaagtcatgccttagtcggtccaggctgccataacaaaatatactcaaatgggttgcttataagtaacataaatttattttccacagttctggagactaagaagtccaagattaagatgcctgtagattcagcatctgatgagggcgctcttctgggttgcagactgccgacttctggccatgtcctcacatggtggaagggtagccctctagctagttctctggggtctttttcataagggcactaatcctatgcatgagtgggaagctctcccgacctaatcatctcccaaagactccacctcctaataccatcaccttggtaattaggttttaagacatgaattttggggggaaacaaacattcagaccatagcaagtcatgaggattctagttcagaattgtttacttgaaaatcactatgttggtgcaagtgccaaacacaaaacagggaagtacattctgtttacacgtgagagattattaaaaaataaccattcaggcttacctttctagataccaacccaggaaagtcaactctctgttacatttgctgggggaagtcagtaaacatgatatcgactcatttctgtcactgtcattaggtgtatatatccttgagttggctggttaatttatttctggtgaaaaaacaagaaatagcctttcctcaagtgaacaggttcatcaatttttacatggtgcaagataattgctgagggtcctagcttgcatgtgcactatgacccccaaagtaaactaaccccacatttaaattaaaatcaacttcagcatggatgacttcaaacaaaagcaataaaaccctcagtttgctttcgtctcctactgtgttttcctttgttctgatgtgctgaaaaatgacagccttaaaaatagaatagcagagcctatttgttctcagctctgataccatttgggatgtgtatacctgtgtgtgtgtgtgtgtgtgtgtgtgtgtgtgtgtgtgtgtgtgtacacatatctatatctcctcttgtgtgctcatagatttttggactttctgggctacattccatcactctacatttccatgtcatatgcctcagtctgtacccacgaatgtcattttctctttgattctcaagctttgtcagtgtagacaatcattgaatctgtagttctggctgaactgtactattagagataagaaaaataaatccaaagtgttttttttttccactctcacacaccactcaacataatacttctgacaccagatgtgcagggatattttatcatacaacaagcagttctccagcacacaccagctggatgtcttacaattcaattcaattctgacattacatacctgcagatagcatcagatcccataggttaaggcctcagttctataagacttaccccaacttttgatgccaatcgcaagtagtaggatgttacctatactatacaagtatactgtataggtatatgggctgtaaattgtggttctgacgacttccttcttgggtttaagaatggctcacagaactcagggaaacttatatttaccagtttattaataaaggatataataaagaatatagatgaacaggcaggtgggagagatatgtagggtgaagttgagaagggtcccaaagtgcaggagcttctgaccctatggaattggggtgtgctgtgctactggcacatggatgcatttgccaaaccagaaactctccaagtccacagtttagggatatttatggaggcatcatcatgtaggcatgatttattattcactccatttccagccactctcccctctccggagaatgggggctggggctgaaagctccaagcttgtaatcatggcttgatctttctggtgaccggcccctatccaggagcccaccaagagtaacctcaaaagaacaaaagatgcttctgtcacccaggaaattccaagagatttaggagctctgtgtcaagaactgggctcaaagaccaaatattagaactaaagattctcctagcatccctattgttcaggaaattgcaagggttttagcagctctatgccagaaactgggggcaatacgtgtatttcttattatttcacagtataataaagaattgtagacagaaaatcaactaattaaggatggcatagctatccaaagctataagctgaaaagataggttctacttcaagctattttgtaccctagtataaaataccctagtgcaaagaaatgtcaattctttctacctccatctcaatcaactattatgcaagtcatgtttgtatagatgttggttttattatttttttcttctgatgtgttgtcctgatggactctttgggtaaagttgtgatttcagagttgagtaggggcactctttttcctgaaggctgaatcttcctggtatcattcatgcggtgaagaggttgagcctcaggccagaaagtagaacttagaaagccagatattattatcatccccagttcacagatagtggaattctcagacaggatgagtggcctgctcaatctcatatagcccctctgctataaaaaataaaataaatcaaagaatctaggattattcattctagcttatcctttttataaaggctataggttggcaagctaccttaaagctgcaatgataattactttaaatgtagtatttgtgcagcactattcactttgtaaaatatatttgtgtgtgtgtgagttaacctcacaactacccagtgaaaaacaatagggactattttctgccccaagtcaatagatctggatatgagattcggaattcaaataaatagccctaaaccacacaatggaggaatttggattagaacccaggtctctagattccttacctggtgttcttttaacaacatcatggtgctgattatgggctttctaatgtctcagtagcagctgctgagaagccacatgaagattctcaaatatacagagcacttttaagagaaaatgaatgagaaggtcattaacttgttccagtcagtggggcttgaaaacaattgttccctgcagctccaagatgctttcttgttcttcaggctcggaagtgatgtacagattagagctttctgacctttggaatctgttttgtgtttctcttcctctgaagttattgattaagggttctatttactctatgtttaagcttcagtggcctttaaaaatgaaagaaaaagtttgaggatcaccttgttatattctagtttattcaagaatgaacataatagaaagtaaaaaactaatccaggaagtaagcaaccaagtagaaaaagatgccaaaattatgaatagaaatagatgtcaaaaattatgtgaatgagaagaaaggaggaaattccacagagattgtagtggagcatgctatgagatattttgataaaaaggtatcatttcatgctctaagaacaataaaagagatttttaggggccatcacataaaagaaccccattattattcctggaggaaatgatctgtcaggaagagtttgacctgtgccatccagaggcacctatgcatggacagtcagtcaaaagaccacagtagacagggtatgtggcaatataacagataagacccctgaatctcaccattcactgccccccatggaaatgaatggtggattgggggcccagagatcccagtgttctgtatggaaaattgtagaggggcactcaggacacaggtgatgttttcagctattccagctgaaggtcatgtctttggaaaagaaaggagactaagggaatgaacagctagagacagtgttgaagagaagatgttaatttcctggactgtggcctgacaccagaacaaatgtcctggctagtatctgtagaatctggctacacgtcacaaagactgggaagaatgtatttggcagacaattctgccctgatcaacagagtggaaacagggtttttgtcagagagaggaaaaaaagaccaaatatattgcaaaacagaattatatgaaagatgctatatctgacatagcaagatgcagcacagtgtgggcagaagttcctagtagttcttaggcaatagtaaatgtcatttatataccaaacctacagaatagaggggacaaacagttgaacttgacatgccaagattcaaagatatatgcaaccttctagatatttctctatttgcatggtgaagcctatgactagaacatatgataaatgaaccattataaaaaagccaaaagaagaatattaatcatatccagagaaacacatttaaatggcaaatacttctgaccagaattcttgccctggctaagtcacaaaagatggggattctgttgctctgaaagattagggttactcttcatacatacaaacagacacccttacctgggatccatcatactgcccacaaaggaaataagaccatttattcaagaaacatctactacagattgggtggtggaaatgcacagatgaggcagacacagcctttgccctccaggaggttacaatctgttagggaagagagatgtgaaaaatgaatatttaaaatccagcaggtcagatgtatttggaagtataatgggggaaaaagtgaaaatcataggggattgaaagggaatgagtttcccagcagaaaatgtgacccttctttgaatactggctttggaggtttgtggatgaatgaaaataatgtattcccttaggggcctggctctataagacacaaatcttagaaaacatcaggagttggatgcttgagcagggtcaatctcagcaatgctaaagaagtttctcatgaggcaaatcccttgcccaagtttcccttatttactgccagccctgataagccctcgtagaaacttccaatctacccatttcaagcctttcttgcttgacagtggcttgtggctagtcctgcttacttgtaaatcttttcttaatcccatctgaagaaaccaggtgggatattgcctatcaagggtaggaacagcagaagaatttagacctgtaaataatgagtcatatactagtataaaaacctaccgatcggagaggggaaataaagtaaaaatcatatcaattgcaataaagggaaagagaatcaaaagttctgttttggtggaattatatcataggatacctagccagatagtgtttaaggatgatatttttcttatataaattatttaaaattatttcctaatacagactatattttaaaaatacagagataataggatgggagactttaactctacatacatttaccagaagtctgattccattgaaactagaatatctcacaaacattagcctcattgacaattttatcatttagcaaagagagggaaaaaatagatgagttgccctttgacttagaactggccttcaaaacagtcttgaattaacaggaactttgagagaaccctctccaagaggtaaaagatacagtacggattgctggacatgttacccaaggcttcaagaaattcagagaatagctagaagcaagcccacatctagaagacatctaaagtgaatgaggacttctaaatttgaggaatactgagagttaacactatgattactcagttgaaaataatcccactgaagataaaaggaaatgggcaactcatgaaccctattggatatatagcggggctttgtgcatttagatctcaaaaaaagtccatccagaaaatggatttgaatctgaaggtgcagtattagtgccagttatttgctgaccactggagacactaaaaacagaatgaagtaaatcttgggtaagatcttcatgtcactgaagcctttcatagtactcatacagcagagtgggtgcttgaacagctatcaaactgaactgctttcccaaataacagatagtaggaagaaaactcaacatttttttttcttttctttttttttttttttgagacagagtcttgctctgtcacccaggctggattgcagtggcatgatctcggctcactgtaacctctgcctcctgcattcaagcgattctcctgtctcaccctccccaatagctgggattacaggtgtgcaccaccacatccagctaattttttacatttttgttagagacggggtttcatcatgttggccaggctggtctcgaactcctgacctcaagtgatctgcccaccttggcctcccaaagtgctaggattataagtgtgagccactgcacccagccacaacactcaacttctatttggtttttcaattttctagcaataattatctttatactcaatgaaacaaacaatataaaaaagaattcaagtcaagattgagggagaacaattaagcactcatgagttcaaccgtttaggccttggaaagttttaagctctaaaataaatatacacatgtcctcttaacaaccttattattaatctatcagatgatacaatgaatgggagagttctcaaaaggctagtgatcagaagctatccaaatttactaaaatctaattccttaaacctaaattttcgttaacatttgtatgtttttattttatttttaatgccattattaaaatccttgacaaaattctagaaaagatgattaaattgtaggctaaaaaaccaaacaaacaataaagtgatcaccaagaacccaccattgttcactaagaacaaatcatggcaggttaacttcatttgcctttgagctaaaatttactatactgataaattaagggactactcccaaacatagcacttattaatttcaaccaggcattcaacaaagtatctcaagtggattcacacctggttgaatattgcattcaaagactgacaggcttgaggaaatgttgtgccattagaatcaggggttctgccctcagcttgtgacctgctcagttggttgccaaatttgtttttaccggcagaggtaaaaacaaatttggatttgagcccatgtgattttccccccattatgctctgttgccgacagacagaggaaagtgatagaaggttgaaaactttaaaaccattctatatcaggaaatgttaacggaacagtcaaactcagcctgaagaagtgagaaaaggaccaccccacttatagaggctgctcagaagtcactgtcttttttctggcccttaaatgctgtataggacatttcttcctattctccgtagcctcattgcagcattacacattactgaccacattaccaacttttttgtatcatcgtcccttggtttccacagtgttacactatctcggttttatacgtttcttcatatccttttctctgtttgattattagttaatccatttcctctggcaactggattgaaacaaagttcagtccttaacctctgctcttctatcccttggagcagctgtattacttctgcactaattgttcctaaatctataaactcaaatttgaccactttcctaagttcaagtcccacttaagcgattgcttgatggacgtgtatatttagaagtctgcaatcatctcgaactcaaaacatctaaaacattactgatctttctagaactcctgcttcatcttggcttccttaattccatcaatggcactgctgtttcctaggtcaaaacttgagagaaggcactgactttccataaccttttttttcatatctagttagtcaccaatttgtgtcaattcctcacttatagattcttttgaatttgtccattaatacccatttcctaagccaagtgtgggttaaatgactgcatagtctttcagcttgtttttcagctcccctttccaatatcccctgcatggcaccataagatcaaccatccgaaagggaggagtatgactctttcattatgtctttccctttctcactagtggcctgccatcctgcagctgaaagactttcttattttcttgtctttcaaattctaacctgccttcaaagtccaaccaaacttcttttcccttccatgatgttttgaatcccgactctgccacctagtagctggatgaccttgggcaacctacttaagctctctgtttctgtttgttcatctaaaaagaagtgaatattctaataatgcctgcatcataggattgtgaggagaattaaatgagttagcatctggttagagcactcagaactggtaatggctatataacacattaaataaatacaaatgtgtatgttccctaagtatgccaaattggaatatatctcttaccctatgttcactactaatatatcatagatataacctttatctcctccatttattaaattatgttgtcgcttacactcccaagtaggacatctgttagccacacatggtctgaaagctcattgaaagtaaaggtcacatcatgtgtttctttatatctccacagtccctactatcagccttacctactggagctatgcacgtaatgatttaagcattgatttgctcctggctttctggatgtgcacccagattctctaattctcaatctcaccatctctgctttatttctaaacctcccctcactgatcttctccaggggcttggtgtgtgtgctacaatccacctctcttgttagccatctctgagcgctacatttatcagggacagtgggtgttggcaggcagacaagaaacacaaatctgtagacagcgccaccacaagccaatcttgccagtacaattccgcagtttgctgacagacgtgtggtgattttccaagcctctaatatggaataccatagggcctttaaggagaagtagttgaagattggggcagctggcgatttcccctccattttctatctttgaaagggcatgtgcctgacatttgactctaaaatgatctgggatgccatagctgtcacataaagaatggtctagcaatagagtgaagttttggattggagtggtgtgaatgcttcagcaaatcttctgaagaccatccaaagccacacataaataatgagtttggaagggcaacaagaatgcatgggatgtggccttctgaatcacccatatagtgttcctggagtggtgggatatttaggataaaggatcattcgcaaaaactcatcagggtgtgtgtggggggtgggggagcaggaattatttgagcacagcgttccagtgcagtttgaatttccacacaaatcctcaccctgatgctgtgacctcagctgaagcagaacaatcagtgtgggggtggataatttccacaaattcatgaactgttttacactaaagcaagctcagacatccttaatcaaaaagcacttctaaccacacatcagtgagtgtgtaagatagccccctctttttcataacgatggtgtactttttttttttttttttttttttttgagatggagtctggctctgtcgcccaggctggagtgcaatggtgcaatcttggcccactgcaaactctgcctcccaggttccagtgattctcctgcctcagcctccccagtagctgggactacaggcccttaccaccatgctcagctaacttttgtatttttagtagagacagggtttcatcatgttggacaggatggtttcgatctcttgacctcatgatctgcctgtcttggcctcccaaagtgctgggattacaggcatgagccaccgcacctggccagctagggcttactttatggtctagggagtttcatgggagtcaaaaaagaagtcacacaaatgctgctctgataattttgtcaactgggtggaaacgacaagttgcaaatctccttattgttttgtccctccacacttatgtcaagagtagctattggccaagttcactccatgaagagtaaatcattcctctggcccaacaaaaggttcttttgcaacacataacatttgtaagctagtgatgggctcaatggacactggccaagaactttaatcatctgcaccacatgcctaaagggctaactcacctcaaacaggcttacagaatgaaattcagaccctggaaaattctggctctaaagacaggaagctccacctctagaaggctctccacgcttcagacttttgtttcttcatccatcctatcctgtatttcctcatgctgaagccttcatttcttgagaaccagggtggtcccaaagcagcagcacctgtgttttacaggtgaatttgagctatttggctttgatacaccttttccagtttgtgttttgctgtaggagttttgttattgtagactctctgtaatttgccttctgtttacctctccaatgcgaactaacttctcctccaccctactcacactccacacaagccattcacacaaatactctatgattccccactcccaccattttttctatttggtcagttttcccagaggcgcgatctgatcactcacccaggaatgcatttggaggctgagacagatgaccctcaccaatgaatatgaatgaatgtttagttagtattcacaggaagctgagattctcaggaagagaagacattgcgaagaattccaatgatgagaaggagaacaattaggggtggggttggggggtagtttggggcttttttatgtttagatgagaggccaagtttgggggcttcacgcatggtaggctagaggctgcactgtttgaaattccagccagctcagagaggtctttcttgtcaggtatcaaaggcagtggtggagaggatggttgagcacagaagggattccaggatcctgccaacactcaagtgccaaagttggagtcatcccctttatgacacttgcaaacctcttcactttcacacaagcagcccctccttgggacacacgccagcttgtccccccaaaactccccttatgagccacctcctctagagccctttcctgactctcactcagctgcaatggaccattctcttctctgctacaatcatgttctgtgcttgcctctatttttatagtacctatcatatttgatctttgcagtagattgaattgtgttctctcaaaagatatatccaaaccctaagccccattactttatgaatgtgacctgatttggaaataagatatttgcagatataattaagtcaagggtctttggatgaggtcatcctgggtttagcatgggctataaatccagtgatgcgtccttataagataaaggagagggatatgtgacacagagacacaaggagaaggccaagtgaagccgaacacagagattggaattacgcagctacaagccaacgaatcccaaggactgccagcagccaccagaagccaggagagaggcatggaatggattcttctgcaaagtctccagaaagaaccaaccttgctgacgcctggatttcagacttctgtcccccagaactgtgagaggttaagtggaggctttttcaagccaccaagtgtgtgataatctgctatagtaaccctagcaaactgatcactttataatcatcagtctggatttttatccttatcacaagagctgtgtgctcccagagggcagaggttgtcatttgttcatctttggatccctccagcctagcacaagtgcctgacacaaacagaggcgcatctgaaaaaaaaaaaaaaaaaaaaaaaaaaaaacagcccaaaccaaatgaatgcagaggcaaaaggaccacagaaattctctctacagcaggaggacttctattgaatctatcagctatggtgaaatcatgaagggctccatgtgaaaaatcaagagtacaccacaggttgcactttaggtcaggctgtttctttactttttgcctgcaggtggacttctagaactattgggtgatgggaaaagtccatgcaccagtctacacaggcactaaagtactttggcatgcatccaacctttctctctgagtccatgttaatcaggtttacccaggagatagacaagtagcttgggtactctgatttaaaccgcatgccctcgcgggagtccctagaatgagagttccaatgctgcagagaatctgttgtttggtttgggtgctttcttctctcactgagcaaaaagatgggtttttttcctcaggaggaggtgagtgagtgaggataaaattatttacttagggaccacctaggccaggtctgaaaattcagcccaggtgggaaacttcagtccagtgagggttctttgtttttgttaaagaaaaagaaattgcagatggacagccgaggagcattggagcagatgtctgaggcacaaatccctgaagcagacccagggaccactgccctttcctgctttccatcgcctcattttacaggtgacaaacagcctggccacttgtttaaagctcaggattttctttttcctccttctcttctcttacccttttttttttctaaaaaccacaagagtgttaggtgatttttccctccctgcctagggaacatttattacagatgcttaatctttcccctctccttggggcagctcaggccctcataccaggaaggagctgaatcgttgccttggcagaaacactgcccacacaaaaggggtaggtgtttttaattttatcttgttctataaggcaggcatgggtgagaaacaagcagtgagtgtgcactgagcaggcaatgggaattagaaaccatggaatgggtacaaaagaaattaaaggatctttccctgacttcagtgagctgtcagaccaacagacagacataaagggagtcagaaaaatagaatgttttttgctagcagatgtgtaaaacctgtagtattagtccattctcatgctgccataaagaactgcccaagattgggtagtttataaaggaaagagggttaattgactcacagttctacattgctggggaggcctcaggaaccttacaatcatggcagaaggcaaaggaaaagcaggcaccttcttcacagagcagcaggattgagtgtcaagtgaagggagaagcccctgataaaaccatcagatctcatgagaactaactcactgtcacaataatagcatcaggaaaaccacccccatgattcaattacctccacctcgtcccacccttgacacgtggggattactggaattacaattcaaggtgaaatttgggtggacacatagccaaaccatattattctgcccctggaccctcccaaatctcctgtcctcacatttcaaaaccaatcatgcgttcccaacagtcctccaaagtcttaactcacatcagcattaactcaaaagtccacaggccaaagtctcagctgagacaaggcaagttttcaaaactaattatgccttccaaacaattgcctgaggtcttaactcattccagcattaactcaaaagttcacagtccaaagtctcatctgagacaagacaagttccttccacctatgagcctgtaaaatcaaaagcaagttagttacttcctagatacaatgggggtataggcattgtgtaaatacacccattctaaatgtgagaaattggccaaaactaaggggctacaggccccatgcaagtccaaaatccagtggggcagtcattaaaccttaaagttccagaatgatcccctttgactccatgtgtcacatccagattatgctgatgcaagaagtgagctctcatgaccttggacagctctaccctgtggctttgcagggtacaggccccctctcagctgctttcatggctggcattgagtgtctgcagtttttccaggtgcatggtgcagcctgttagtggatctaccattctggggtctggagaacagtgagcctcttctcacagctccactaggtcatgccccagtggggactgtatgtgggggctccaaccctacatttttcttccatactgccctggtggaggttctccatgaaggctctgcccctgcagcaaacttctgcctggacatccaggcatttccacccatcccaaacctcaatttttaaggttcccaaacctcagtttttgacttttatgcacccacaaacccaacaccatgtgttagccactgagacttagggtttgcaccccctgaagcaatggcctgagctgtgcattggccccttttagctgtggctggagctgaagcagctgggatgcagggcactgtgtgctgaggctgtataaagcagggaggccctgggccctgggccaggaaaccatttttaccccctggcctccaaggctgtgataggagggactgaaggtctctgacatgccctggagacattttcctcgttgtcttggtgattaactttcagctccttgttagttatgcaaatttctacaaccagcttgaatttctcccccagaaaatggggttttcttttttgtggcatcatcaggctgcaaattttccaaacttttatgtctgcttcctcttgagtgctttgccacttagaaatttcttctgccagataccctaaaacatctctctcaagttcaaagttccacagatctctagggcaagggcaaaatggcaccagtctctttgctaaagtataacaagagttgcctttgcctcatttcccaacaagttcctcatctccatctgagaccacttcagcctggacatgtcattgtccataccactatcagcattttggtcaagccgttcaacaagtttctaggaagttccaaaccttcccacatcttcctgtcttcttctgagccttccaaactgttccagcctctgcctgttacccagttccaaagtcccttccacatttttgggtatccttatagcagcacctcactctactggtaccaatttattgtagtagtccattctcatgctgctataaagaactgcctgagactgggtaatttataaaggaaagaggtttaattggctcacagtttcacattactagggaggcctcaggaaacttacaatcatggtggaagacaaaggagaagcaggcaccttcttcacagggcagcaggatggagtgagtactgatcaaaaggggaagcccctgataaaaccatcagatctcatgagaactaattccctatcatgagaaccgcccccatgattcacttatctccacctggtcccacccttgacgtgtggggattattggaactacaattcaagatgagattttggtggggacacagccaaaatttatcactgtacttttcatttttcaagaaatcttcatatccatgatgttatttcatcttcagaagattcctgggatataaagcaggtgtatgactttcagtttccagatatggaaacagagaggttatgggaatggactacttgtgtcaagttaagataaaaatctcaacctgttagctacaacttctacttgccactttaataagggtggctaccctctgctggatccttcttctctgccagatcctgttctaagcattatttcattgaatcttcataagtgctctctaaaggaagaactggtgttactcctgtcttacagataaagaaactgagacttatccagataacacagctagttattgttgaaaccagaattcaaaaccaagtctgtctaactcaaaaactcttttttcttgtagctctaagattttaaaatttcatttgatgagagggtgcagagtaaagtagcagttagcattagaggacttgatcaaggaaatttcttagcagatgtaaacattggcatccacttaaatggaaacaaaatggaaggtaacatttattgcatagttaaaataggtgaatccctttagaagtgacactaatctagcattctttacacgaatgggatgattctcctaattttacaggaaagaggctaaggcttggagagattgaataccctgcttgcagtcccacagctaggacatagagacaggattcacatttgggtttgtttgacctcagacaattcacatgtttccgctctgccatgcttaattgtgctatgaaggtggaaggtgactgcaggtcagattgcacaaggttgagcatgttctagtcgtttacaaggggacctgcagggactttgatcagaaccacctatctgtgttggaggagaacataggtatgacacagctaaaatgtttaggaggaaaaaaaaaaatggcaaaacttggtagcagtagacttttatcttctcttttgataaattcttaaaagttttcttttgcccaatagcagaacaaataactgcacatttccattaattatttactttccttcagattcttttgacatttctatcatgtgctgacagatgcaaacaccctcttattttgtctctctaaggctacatttgtggagagtaatgttaatgactgctactatttttttgagtacttacaatgaggtagccacacatttgcttacgtcattctcccaacaaccatgaaaggtacgtattatttatcccaatattcagatgaggtaactgcaggcaagagaggttatataattcattcaggtcacacggggagcaaatggcagagtcaagacataaacttgggtctgtgtgattccaaaatatattctctttctgttgcctgaaggtaactggataggctgtacatggaggcagtggcggggtgggtgagagggggtagtcttttccggtcatgtttgtgtattttaatttgagataataaataatagggaaggagatgacatgatgaaagtggtgtttggggcaagtggggagagactggaggcaagaaacccctttttcacaggccatgaatagtaataggaatttgaaatcttgggcacctggataaaggatggtggctgtagaaatagaaaatgatgtcttgggatgagtaagctctgtagaaaaataactggtgagacttgaatcataactaaaggaaaaggaagagctgaaatggcaccaacggcaagttctcaggaggtacagtcacagtatcatcactgtgagaaaggatatgaaaagggttttgaaggccagcattgtttcctcctcaggcttaaacagagagggctagaggcagggcagccactgtgaatgactgggccacatgcacttgtgccagtgcctttacaggtggtcacaggtaaagaaagagcttccttggaaaggagaatttcaccattctcagtccctccccagatgagaagccttgaggttatgctggctaagagctgggagaagtatgcttgaggccagtgagaaaaagaaaaacctgtgctgagccacacatgtgtctacacacctggcatggcaatcctgttctccatgacgacatccctccctacccctccacaagcccagcctccctgcaggaggattcgggaagactgcctctggagctgtccagcttccagggttggaaggaagcctttatcaatcccatcaccacttcaaacaaagccatgctttctgaggaggtgtagatcttattatattattttgttttccattcttttctatcagttcactggatcaccctctcttttgctgagtagcatgttgacattttttatgactctctgttaccctaagaatatttctacgtaagttttttggcctgaattattgacaacagctacaaatccctgcctgcagacacctatgcacacactggaaagttccatatagggcaaaggtcacaaagtggcagcccagaaactagatgtggtccaccaatatgtaattttctttgacctacacaatgtttgttaacacttggaatcaacatgattaagttgggaaatttcacacattttcacatttctagcttctcttaaaaatatgaaaagacgtggcagtcctgggtcagaaccccacatgtcagtaagcagctggagctgggttaccgataccccctttagacgtagcattcggtccctattttgccacagtctccaccactctttattacctgacacaaagcccactgccctcatttgtctcacttagctggcctctgtaggcatttaactttgagatcccaatgtgtggtaatggtattggtttaagcagaagctagttggtgcccacaagttataaatgcacttgggtagtagatacaactgaattctaattcctttccctttcctttaggcattcttctgctcatcacattctcttcccaaaatgctcagcaccttatgatgaatgccgagcaccaaaatatcgtcccttcctgccactgtagtgtaacataaccccaggttagcctccttccaccaagactctcattccatgatgtctcgcttatcactccctagcccaagcagagtgaccttgagagctgactcagggagatatcagtgacattgctgtcacttgagtcaatattggcaaaggaaagtgcaagagaaagaatgtgatgaagtaattagttgattatttgggaaaggatttgggacaccggggaagtgaatagagtgacctgaccaggtggaatgatcagcctggagagctcactctggggacagagtgagaggcaggatggagggacaaggacctgacatggggagcccactagggaagttgtggctgagtgtttccaggctaagagtgtagtcccatctctgctcactcagtgtgcagccacctctctggtcctcagtcttcatctgtgacctccttatgaccttatagcattggtcctctattactcactttggcacctaacaccctctacctgctgttttcatcatgaaggtgcagtgaggacaggacctgctccctttggttggaatcttcccctggttagtgctgtcagccatgcaaagtttgtattgtgtcatcatcccctgaagaaaataagaagggaatctgggtccagatattcccaaatgatatgaatgtctaaaatgctgggtttgtggctatgtgccagttgtaatttgtgcattttttggtagtaggttttgttggatttagattagtctttttataaaataagcagcatggtagagtggagaaagtgctgggttggggctatttccagcctgtctactactaggaaacacgcccttaaatggggcctctttagagtagatgggctgacaaagccaagggtattgaaaagaagaaataagcacgtaccatgcaagcctaactgggcctttttgcaactctgagtttctggggtttcatagccacaatctgaccaacagcaccactgagagagctggtttttatccattaaataaaagcattacttccgttactctcagctacacttactgcagtaagcctaagtaacattaaagaccaagtcaccttcatcttacatagattttaaactttttgaagcgggcagatactataccttcaccttgacttgaatcttcccttgagcttaatgcagctgacactcaacaaaacactcacaaattgactcattgctgttcaattcttgagtatatgtatcatgcacttcctatgtaacaagcgttttactaagtattaaagagttttttttaaagaaaaggaatgaagcatggtgccttccatcaaggagattccattctggtagagggccattcctgtgattatgtacacatgcagcaacaactaaatccatttgataagcattctgaggaaaaactgtaaaaagtactatggaagctgaggttggggatagtaatggaaagttcctggggtaactgatgccagagctaagccttggaagatgagtaatataagaagctcaccatcttgcagggaaatatatatatatatatatgtgtgtgtgtgtgtgtgtgtgtgtgtgtgtgtgtgtgtgtttaatttttctgagtgcctcactgtaactcagtacgaatatcctcactccatgttaagcccagatcacctgcagagatacctattattacttcttttcatttacttgtctttttttttcctattgtatagtagcagcaacatttagatagagagttcccttgaattctctatttttaaaaaagcaattagacattcatgatcaagggtaatggggctctgggctcaagtcctctattttgttcccattcatctgtgggtcaataggtaagccacatctgctgagcctcaactgcttcaaagtactcatccttgctggacaggcaagttgctggaaacaagttttccttcagcaaccattcaggtggcaaatgttttattgaacatctacactgtgccaggcactaggtgaggaatcagggtccaatcaaactctccaaaccactgctcaacatactcctcctttgacaaatgggttttcaaaataagcatgcacataatgtgcctcctttggcacacttcccaagagatttcactctgaaaagaaaggccagcctcagcccttaaagtgcaggccaaataaaaacttgcttgactatcaagattatattatcatctcccctccagttcccaccagacttctaggaaacagccagacagctcctccaaccaatccagtagccaaaataatccattccaaagcttcaactgagcatcttaatgaaataattgtttacctgattagtattcagcatccgcagaaggaggctaaaacccacccctttcaacctttcctctctcagtctcactctctctttccttcccaccctgtctcctttcagatatactttcgaatcccacccctttcaggggcacaaagaccaactcaaatctgatcgcagcattatcaatcaacttattccctccccaccgggcacctcctaagatatttttcaccatttctttcattctttgaaaacgatttctttgtcaccaagcctgtgtggcacttcccctgcctctcctcttgaccctgcactgtaatctggacactcctggagccaagccgtgggagaggcagccatgctcagtctccctggataaagccagggttcccttggcaacgggaccgtgtggacattcgcaaaggggtttccctccaccccccaggtcctctttcaactcaagagctcagtcctgtgtctctcatggaggcgtctctaaccagggtaggaaaacaatagttctaaatatcggtaattggtgtttggaggccattgttttgcattcaacaggcaggaaaatgtgagttgagtgggcgagtgaattcgggcgttagctggtgagcatccatggtcaggcagagggaaagctggtttcatttctgtaaacaggcaaatgttgatctgaagtagtttgggtctgtaatgtgtgtctttgtcttttgggaggtgggagaatggggagattaaaggagagaggcttctagagacaagtttttactttatggtctgttttctcttttatccttatcattttatttatataaagcaaggaaaccagggattacttgtctccatgttaatgccaactcttgctcatgatttctgactgttcacacgctctcactgtctcccacatggattctctccttctctctctctcactttttatggactttattgtcatgatgatggagaagtaaaattttttctaaagttggaagtggattttttttttgtaagaggtcatctctgaagagctgagccagggctaggcaggacagaactgattgacacatactaaccctgtgggttgtgtcggtggtatcggaatccctgttactgacccagattggtccagaagacctcaaatgtgcctttggttgatggaggaaatgcctgttattgacttggttaatactaatcacaggtttctacaataattcagaaggttattattgaagtcctggctgaggtcctggtaggggatactaataggaggaacttattcagctacttcacttcccctcaggagttcagagtaggtgaggaccttaccaaaaagcttttcaggaatgaacctgaagcttaagacctttgaaaaaaccagagataagtgcaagtaaggcatgaaaggaggaggccagagcaccgttcagttttcctttccttttctctcttttccttcctttctttctttttccttccttccttataaaatcacatccagagtgaggcctaagcataactgcttatggaacctctgagaaggtatcttgaagtacttgctgagtttaaactggctactgcattaacctattaaccaatatgccaacaccaaaaaaaaaaaaaaaaacttattccttttactatgtattcaaactttcagtaaaccctttggggacaggaactatacagttttcaatattttgcccctgattctaaccagttaggggccaggtacatttggggggctccattcatggttgtagaattgaattgaatgaacagtgtggggtatgattaccatttgttccatgaagtgtagagctaggactagtcttgtggtcagaagacttaggctctaggctcaggtctgacactaattagtggcagaacttcgaccatactatttcagttctctaacactcagtttcttcatccatgaagtgacagagtttaaacgagaacagtgttttcccaacaaaagtagttatctaaagccttcatgcccccctcaaccctgggggataggagggtttgggagagggaggcccgtctggtcaagaacagctgctgcaaaaaggaacatggcagacagaggaggaagtagagcaaaaagtggctcagagactggaagctggaaaatgctggaccttagaggactcctcaggtcccttgtaactctgacatttattcagagtcatgagacttatctctcccagttttgtgtcacctctcctgtattaggtacttttgaagatgacacaaagcagtactgtcatttgttctgatataggcaagcaagctacctttcttccatgagacaaggcttctcactgctgagaggtctgaatctctgcccttggaatgtgccaagcagctggtcctaagccagccacgctctgtctcttcattccaatatagtctttcatttattcgacaatcaacaggtaattattgaaagccaataactttccttttttctggatagcgtggtcaggaaggttctctttgaggaggtgacagttaagctgaggcaccaattaagtgaaggaataagctgtgcttacagtgggagaatagcactggcttgagtctgaggacccccgtaagtatgaggctcttgatttggggagtcagcttggcatgtcttaaggcaaagcaaggtgcctggggcagaaacagagtgaagcagagaggagaggtcagaaggttggagtgagatgacacagatcacaggggccttgtaggtcatgatagggaccaatgggaagccattggataaatttttacatagaaataattatatctgatcactccagcaaatgcgcagaggatagtgttctatagatgatatctgcaaagtggttggttagagtgaagggcttggaaactaagcagcctacgtgggaagtcacatggtgtctgggaaacttggatgtggttggataggcctggatttgaatcctgatcttgaggctgacctattgtgtaatttgggcaagttatttaacttccctcttctccatttcctcatctctctctcactctttttttttttttttttccttgagatagagtctcactctgtcacccaggctggagtgcagtggtgcaatcttggctcactacaacctccacctccagagttcaagcaattctcatgcctcaacctctcgagtagttgggactacaggcatgcaccaacactccaggctaatttttttgttgttgtatttttagtagagacagggtttcactatgttggccagacttgtctcaaactcctggcctcaagtggtccacccaccttggcctcccaaagtgctgggattgcaggtgtgagccaccacgcccagcctgtttcctcacctcttaaagagggaccacattatctacctcaatgagttgtgaagatgaaagcagagagattacatatgttatctcaaagcagctgcttaaaatgatagtgttattgtccaaactaatcccatgacctttgcactatgggccacagatgagcaagacaactggaaacgtaagatgcatggtgggtttcatatattatcctctttataccttgctccctttgggaacgtgggaggtggaaaaggaaggagtaaggtgacttgtgccaagtcttgcagctggttaaggtcagggctgtgtctaggggccaggttctttgttcctgcctcatgttctttcttttacgcttagagttagcaaactacagccccacagggcaatcctagcttgccctctgtttttataaataatgttttatttgaacacagccatgctcactcatttatagactatctgtggctgctttcacaccagggcagcagagttgattagttacaacaaagacagtgtagccccaaaaagccaaaatatttacttgccagaactttacagaaaaagtttgccagccccccatctacaccattcttctcccttaattggcatggctttattgtatttagcttagatattaccaaataggaaaggctggcctctctaggtctccaaaacagtgggattcagaggttcttttgaggagagcactgtactggtagaatattgcagtgagagatctcaggccactgggagccagcagaaacacactggtcacctggcaggggacagcaaagggagaggatggggactctgggcatggtacctgggtagagaagaagggaatcccaaatacttgctcttaactatttcagacctcagagacagctatctaaaacaggtgaggaggaatgtagagggctcaggaaatgagcaatgcagcagctttatctgaccaccacaacttgaatgtgcactgctgagtgggtctctctgggacacacctatcagggattagctggacctcagggctgctcatcactttataccctcggatgaccatcattagcacactgggaaacaatgcttgcttattcccagagaccacagttcagatgcaaatggatcttcctggtgactcctccttcctctctcgagactttaggagtatgtgtggactatggcgtcttaccagggactatttccctgcctggcactcaagaagctcacagcttggcttcaggtgtttggatttccaagttcccattgaggcatttaaataggctctcctacatggactccacttcctttaaacctactgatgcattcagtcttgacaagtgattacttacctacctcaaggttttaatctagggcttgagggtacatttgtaggtgtaaatctataggtcagaaagcagtggaggcttcacttgattggatacgtggaatccgaattttagctttaccggtacctgttcctctccactcccgttttcaggcttattgccttaagcagtggaaactgggttacacagttcttcaactccaggtaatataaatatagtgccatgtatttcttggcactcataactttccagccagcctacatggagaacaccccagctttcaggaatgctaaataatccgccagatgcatctgccatggtgtttcaggctcattaggctcctcccactgatccaatgaacagatgtgctaatttttcacttgctgggaatgcttcagccatttgaacaccatggactcggggttggatcagtcacccagtgccctaacactcaagctaattcacaggctgagcaactcccctcacatacaccccagtggttatcttgcctaattcctagaagttggtcagtaactgagttcaagtggcatgacaatccagttccaacatgggctcatcctcccaacccaagacctttttaaaaagaaagggaagaagaaaagcaatcttagcctccacaatgattcccttccatttgccttcttccatcctggtgcttagatgaggttacggccctagcagaaatgaaatgaaatgaaactgtaagaaaaagtcagcaaatctaaaacactgctgcctgttatcagtgctagcagccttcattaagccactgggggcttggacaaagcaagtggagctagaacagcctctgctttcttggaatgtaccatcaaaataagaaactgctgaaatgaattgagcaagcagattcaagggggtaaagacagacaacaacacagcatgtggggagggaggggatgttatagaggagcctatgctgaaaataaatgatttttttataagtgtggttaactttactgaggctaaaattgctaaacaccgcatgtattttcccccctaaaataaaagctttggggaattttgatctgcctcacatgaaaagctacagaaaaggaaggtatgtgtgaaagcttttaaaattattaccatatttcaagtaggataattatcaggaatacttgatgccatcagaagtaaactaatatagaattgctttatttacagcaatttagtcatttgtgttgccccattaacaagattccctagcattcttattgatagaaaatatttaccaccatctaggaatggtctaggccaaaaaaaaaaaaaaaaaaaaaagcagaagaagaagaaagaagaagaggaagaggaggaggaggaagaagaagtagaagaagaggaagaaatgggccagttttgttgaattctgtctagtgtgaaaacttcagctgtctcctgaatgaaagtcatcattctgcatttaatcaatatccagaaaatgatattccatgtgaagtgcgacattttgttttgtgtttacttgggattggaaccagctgattgactgaacaggctacagtgctgcccttatgaatcagcacttgagtctgtaatgacctaatttcataatttagaattgaacatctatcacaggctctgccctgtctctaatttgccttttatttcagcatatcacagttagcctgagcagatagtacttctgtgagttctgaacatttcttcagcaactctgaaataaatatgagatttatagcattatctttgtccaaccagcatatatttccccagatataattttgttcccattttataagatgttgacaagtaataactgctaagtgtttttatgcaatgtgattaaagctagtagtacctgacagtgtccattggagacacactctaacctctaccctccccctttccaagacacacgtattaataactctttagcaccagtagttactgtttttcttgaacatcgtcagtcttgcagtctgattaaatgcttttgcatttgaggttcgggttgtatttttgtttgttggacagaaagatagaggggcagagagaaatggggcactgtcagctttcctgcatgttgttagagcagggatagtaatggaaatagcattttaaaattataggatataaccaagggggccagggcggggcaggggataggagtaattagaggatttgaccaggggtgggggcagggcaggagggcagggcagagagatgggaggggtgggccatctggtgttaatctcctgctgtgtgtttgcagggcaaaatagtcagggtactttgtcaaggtacagtctgcttttgcagacacagatggagcaaaagggagattaatacatgtggttctaaccacctttcatatctttacagctaaacattatttatagaaatcaattagtcctctgtctctgcaattttattatgaggctctgtccaagtttctggcaagctctttaagaggatgattgatggtaaactttcagaatgaataaaaaatgaaccctcccctaggaattggtgtagtggagagaaaggtaaatgataaaaattacaaactctgcaagtttctaggaaagtaatgtaggatcagtgtggtccttgttacacagtttttccttatggctaactttcttttctctttctcttcctttctttcttttttcttttttctttctttttctttattttccactacattcagcggtctgtttgctatggaaactttaggagagcttgatgcctacaactgaacttgtgggaaagtaaaggtttattcatttgccaagctagtaaatgccactttgattactgatgctcataagagataaagagttccaggaaaaaaatggaacagagctctcatgttttgtcttatggaaacttttataagagatgggagctgccgattgcttccattaaattagtctaggagccaagtaatggtaagtatgaaatcccattgtaatgaatcccgtggaagatgcctattgatttattctgaaattccagtcttggtagagactgctgccaaagctcacaccctccaggctcagaaataaaacagtaatgataccttagaggtgaagaaggaatgatcaaataaatcaaagttctaaacccaggagaagacaagagacagtggcacatagtgcacaggttctaatgctgttgaaccttggggtgtgaagttgttctgttttgataactattttgaaaaaaccagagggctcttttggcctctaatacttgagatggtggtgatgccaaaggtcaaatagaattagaggagatttgtatgccactttaagaactataaaggttgctggagagtttcctagtctcattcaacctcggtttcctcctctgtaaaataaagattgtaatagtatcgacctcagagttttgctgtaaggattaaatgagattatgcattaaattgcttagcatagtataaatacagcaaattctatcgtggtagtatcattagggttaacaggattcagaataacttttctcattgtcttaaggtttggcatttactatagaacttgttcttgtttactaattgagaaatgtacctgaaggggtcctagtaactgcgttcagggaagatagtcattatttccatttcgtatcccactctgtattactttgatatgaaactcgtacacagtaggtactcaataaatacttcctgatttaaaaattctaggtttaaatgaaatttgcttgagctgctgatacaaacttatacaggctgtatataatgcaatttgttgatatatgaaataactaatttccaaatttctgtaattccccacattactcagaacatctttttgtttgatgaaatcagctaacataatgtgtgacacgtatatgcttaataaacatttattgaatgatgaattattgcataaaccctatagaggattaaaagagacctagacaaggaaaagattttacattaaaaaaaattaacttttctcttagatttcagtaaaaaaaaaaaattcatgaattgaattagaaatataattgcttgcaagctatagaaaatgtgtcttcctaacttaaaagaaaataatttgtagaagatttgggacagttctcagggtctatgggaatgctggacaaccatgcttgccaaaatgcaggatgcaggcagcaacacagatgtgagagcagaaactttaccagcttcactgatcagcaccatgagtaagtttctgttgttattttcatcctagttccacttcaaagtcaaaatcccagaaaagagtctgattggcctagcttgggtcacatgtccaccccacccccaagtgtagtcagggcagggggtcttatttagagtctcaccaagaatacataaaactaaggagaggtagttctcccctacctaaaagaagtcaggattctgtaaccaaatttaaaatgtccacattataaacttaataatatctatacataataagtatgcatctatgtttatttgcttagggccgcctcacaaactaccatagactgagtggcttcagcaaccgaaatttattgtctctcagttctggaggctggaagcccaagatcaaggtgtcaagagggttggtttcttctgaggactatgagggaagggtctgttttaagctcttcttctggcttatagatggccatcctgtcgttgggtcttcgtgtggtccttcttccatacatatctgtccacatttcctcttgttataaggacacagtcatattggagtagggtccactttaatgactttgttttttaacttaagtacttctttaaagaccctatctccaaatagaattatattctgaagtactggggtgtggaaattcaacatatggatttgggtgagggaacaaaatttaggctgtaactgcatgttgtaaacacaaatgagtggaaatatcaattagcaaacacctattttatctataacacttttagtaaaaatggagtaatcagccaggcgcagtgactcacgcctgtaatcccagcactctgagagactgaggcgggtggatcacctgaggtcaggagtttgagaccagcctagccaatatggtgaaaccctgtctctactaaagtacacaaattagccaggcatgctggcaggcgcctgtaatcccagctacttacgaagctgaggcaggagaagagcttgaaccctggaggcagaggttgcagtgagccgagatcgcgccactgcactccagcctgggtgacgagagtgagactccatctcaaaaaaaaaaagaaaaaaagaaaaaaaaaagagtaatcacttagtaaagtctacagagttatttaacattccaaacttgctggttgagctcaccagaacagagataaacaggtttttctcccccagcccgttctttctcttttaaacccatacttgaaccttaagaaatgaaagttggtaaaaccctttctaaccgaggtgccagttttgcctataacattgttcacagagatttttctaagagcagagccaagcagaaatgactcattattacctccactacgcatacagattttcatttggacactagccactgtttaaacttgacactgtccagcctcgagcaatacatgaagcaagtaatagtcatgtagcggtgcagaaagccctggctggctcctgggctatctagcttgcttcctaaaacttccagctcccctggtttataattctgtgattcacattttctcagcacacatacctgtgggcttcttccatgacccatgccgactttcatacttccatacctatgtttccttggaaagatgtgcccttggcaacagatttctactgaccaaggaactgagaggtagcttactcctgaaagtttagaggtagtttatgctgttgacatctttgtagggggaagagtagcacagcagaggcctgcccatcaatgggaactcatccatttagctctacctaatagtgtttgacttctttttccttcccttccaatgcctgtgaatattaatccatcagacttagaagacaatctgaacaaacacacaagctacatgactgaaggtgccaactcccatctatgagggagaaagcatctagacacgcagaacagttttggtttattactctttcctcagtgtaggcgtaatgtgatgtgttttgtgtggtgtgtgtattttggtgtttgtacacatcatcatggaatttgggtaaatctgcatcagcaatagcaggtgtgactttggtgtaaaaagtaatcccccatgtgagtcaaacagtaaaaatgtggacccccaaggcctctcatgatctgtcttccatccatatctccagtcttgtattttattcccctcaactctggccacatactccactcaccttgcttttccacccttctgtgcctttggatctgctgctcccttggcccagaaagacctccgttgcattccaccctcctctacacctagatgacttctactcatgtgttacatttcagcctagatgccagatcctctgggaatactctgcccatctccctactccttggtctcagtcagatgcccttcctcaacacgccatagttcgctgcccatctctactggatctgttctcatgttgtaccctaattcattgtgagtttgtctgtttctatcgagactctgtgctgcttgagggtggggactgtctatctcacctcttattctccagcccgtagcacagtagctggcacatgattaatgtttactggctagatcaatgatttaatgaagaaatgaattaattaagtgaaaaaaagatttagagacacagctttcttaatatcaacaatctggaagttctggaagcctctttatttgaaaatagcaaagtctttttaacacagtcaaatgcccccaagattccaagttgaaaattgtctgtgacctgtagattattcttggggcctcttatcataaagttcagccagtttctcaggataatgcatcaatttgtttctcaatagaaatctgttctgtcagttgaaaatacttgatggtgataactattggacaagccacactggaaaataaaatccagttcagactgccaaaattataacctacgaagaagaaatggtagtatacacaaaatgctcattgttatggtgtagtgaaaagtacactggatttagagccaaaaggcatcaaacctggtccccatcatttgctagttaggtggcactggacaacttagttaatgtttcagagcccacctaatttgcttttcatcctgtaaaataggttcactccagttgccttatgaactttaagctctgtgtcagtatcatggaatgaaaattgatattgcttgagtaactgctacgtgcctttcattctgttaaatgttttaaagttgagtaaatccaaatgcagattcctttagggtcacgtaggacctgtttcttgctataccatcctctatctagctcatggcttaccaattactttttttttaagaaaatatttcataatcacccatcgagtccgtgttccatgctattatacttgctattacatagactgctattctatattacacaagaccactattaactaggccactcactattctaagcaggattttatttaaatgagatagggtatgctttatgtctcatttccttgtcaagtgaagtagatctgccaaaaggattcaaataaatgttgtctaggtaacatgttctacatacccaaatttctcagagttctagtggaatttataaaatgtctacaccaatagtcagcaccacacaccctcttgttgcctctgaatcggccacgtgggatgcttggcgtcatatagaccaaacgttcagatgttggactcattttttttttagttttcatatgggtgtttgggactcagagaaacaatcaactttagcctggaatacaggatccaaggattgttgaaacatgggattagtctgggttttctggaggaaaatgttcttttcaacatcactttccagaacagggatctgattctgtttatgaacaacagtgccagtgttgttactaacaacaagaattgttcctcgtctgttgaaatcacactcatccatcctttttacctctagtgccccaattcaggtcctagtccatgagtcctaattctccttgggaatttacctaacccttccctgcctctgttttccacatttcagtctgcctaccatactctcaccatcatttcaatgcaatctccctgctgaaaaacttgcagagcttccctctcacctaccaatagttcaaatgcactagatcttccaaaatctggtgcctagtgtgaagaaaaaatgcataaaaaaagtaatcaggtggtctttgttctagttccagttatgctacaatgtaaccatgtgaccttggaagagctaccttccctctctaggttgtagttacctttgaagagttgcttttcctccctagatctcagttttcgtgaatgtgaaatgaatgaagtgattggacaagatcagagatgccagatgaatgacattcagtcaccactactttcctatagtgtccttggaattcatcattaattgatctttggctttttcccactgagcgctaataagcttcaaaatcatccatgccgtcacttccaacagaccagttaacttttgaaatcaaagccctttacctccctcaatgggatgatctctgaggttgcttcctgctctaacattccacaattctacagtctctttccatcttaaccacctactatttctaacgtgaagcccatactgcagccaaccgcattttgaacagttcctctaaatgcattttgaacattttaggccactggaatggcctaaaatgctttcagtcacagttttcagtcaaaatctgacccaccctacaaagctgaggtgagttccactctcccttgaagctggacatgaccatgcccttcactcctgaatccccatagtatttttttgtttagttataacatttattgatgacaaaccctataccccctctctgagctttttgattgctgtattgaatatttgtgtagctttctttgccttccattagattataaactcctgaaatttaaaatcagacaacctatgttcaaagtccagttcttcccattagttgtcatgagataaatcattgaatctctttaattattggatcagccatcactatatacccagcccctagtgctgtgcctggcctagcttagaaaatcaataatgacttgtttaacagaaggaagaaaggaagaaatggagataaagagagaaatttactaagatctacctcatgagcttagtgtggaagttaaataaatatacatatacacataaatattatatgttaaacatgctatataaacatatatcatgtatacatatatgttacatatatatacattcatatgtgtgtgcatagatgtgtgtgtatatatgtatgtgtgtgtatatatatatacatatatatatatacacacacatacatatatacacacacacacacatatatatatatatatatatatatgtaattgaaaaccttggctcaaatgttgaaaatgtctaagttactatcaatactaataatacaataataagggataaaatacttattaaatccaattgtatgccaaggacttcacataattatgaaagctggcatggtgtggtaaagcagtgcaaactttggagcccaattaaatctgggtttgtagccccacttttctgccttagatgactttgggtgagttacctgactcctgaataccttcattgtgtatattcaaatgtactacactatagtttagtaacacctccaaaatctcagtggtttagcatgacaaaagtttcccactcgtactacatatccattgcaggcaagcaggaagctctgcaccatgtagtcactcagggacctaggctgatggaggcttcaccaccttacaactatgtcatctggatcacgtggaaacttccagtgctacagcaggggaagagggagagagagtgtaaaggctctcacttaagcaattaatggccaacacagaagtgacctatgtcacttttagtcatagacccaacctcagtgggcctggaaaatgcaggcttccacatactcagaaagagaggggaaccagatgtcagtgaccactagaaatgtctgatgaataggcaggcgtggtggctcacacctgtaatgccagcactttgggaggcaaaggcgggcagatcacttgaggccaggaatttgagaccggcctgaccagcatggcaaaaccccatctctactaaaaatacaaaaattagccaggcatggtggtgcatgcctgtagtcccagctactctggaggctgaggcacaataattgcttgaacccgtgaagcagaggttgcagtgagaggagatcctgccagcctggaagacagagtgagactctgtcacaaaaaaaaaaaaaaaaaggctgatgaggataataatgactagtgtgactactgtgtaggactcttaggagaatgaaatgtaataacctcatcaggcagataggacaggacttcagcaactgttggtgtttttcctctttttttcctaatgaattgggacaagttgtatatgtatttattattcctttttcatttcaaactcaagtgtttgcacatattactcagtaaatattcactaaataatttaaataagaaatttgcaattgtttttcataggctattttaaattcacaggaaatgtatttttgtggttataatcaattgcaagaccaacttaccattttggataattgtcatatctagaatatcgatagacatcgtaagctcttagctttgttttttcttgtttagttttggtttagttcgtttgttttcacaaacgcttttagaattcacacaacttattgataagcctatatttcattattattatgaggcatctttttagcatgatgatgctggtttcatataggtgctaatgaatcccaacatcaccctaattggaacagttactttagaggggtagaggctatttggaaagggaggttgaggagtgaatggataagtggagacagtaggcttagaccattgcttctagaattttgactagagatcactgcctttgctgagatgtggtttcaaaggagtcttgttttgttttcattttaatatggagggaaccgagcctgcttgaatactgtgaggaatgatccagaaggcagggggagtttggagatgtaacagaaagcggggaaaacaatggtctttagagagcatcaaagaggcatatccagaaatcatctgaaggcctggccctggaccagagaaggggcatgttctcctttgaagctaaaggagaggcgcagaggaagtgtgcagaggcagggagatgtgtagccctggcaggaaaaatttaatttccattagagaacttctaattccgtttaaaattattatcattattattttttttttcagagacatctcactcagttgcccaggctagggtgcagtggcacaatcatagctcactataaccctgaactcctgggctgaagcaatcctcctacctcagcttcccaagtagctggaactacaggaacaccgccacatccagctaattttttaatgttttattgagacaaagtctcactatgttgtccaggctggtttccaacttttggcctcaagtgatcctttcacttcagcctcccaaaatgctggattataggcatgagcaacgaagcccagccttctaatatttttatgaagtagtacatccaccaagtgagaaggaaagggatggagggtagcaggatgagtgggagatttaagaaaggcagaaaagtaagatgggcattgatcagagtggcagaacaggcttcctagagatcccaggagacagcgccaagccatcctgagggcttagtgtagagatgttaataacacatcatggcaagctgccctgctactcctgttctgccctgttggcagcctcagtgacaaaccctaaaggtgctcctgctggggaggcagcaggcaagagcaagtcccctaaggctgctctttgtaatcctaatcaagtgggtacattgactttggtcaatctgatgatctatccagaagcttagactgcagagattgggttaacagacagaggccctgatcaggtcgatctggtaaatccacatggatcggtggcagctctgctgaagaaaaaagaccttgcaagcccccatcccaggtcctgaaagtgtcccttgttctaagactgagggattcattcaccttctttgctccatcttgaaaaacaaatatggaagaatattcaaaaaatgaccttggcgtcaaagaaaatgattagtgaaggcacccattcactcagtaagtcaacatttattgagctcctactgtattcctcctccaggaggaagaaggaaggctccctgccccttcagggatacctgcccagagagtaagatagacacctaagccaataattaccaatgcaaatacgggagtacgtataagagctataagaactcagagagggagcgacagagtctgcaggaggcagacaggttgctggagctaagtggttcatcaggaagtatcgggatgtgtttaatgccaatcttcattaaatgtattaaaataacctaacaggtcgggtgcagtggctcatgcctgtaatcccagcaccttgggaggccaaggtgggtggatcatctgaggtcaggggttcaagaccagcctggccaacatggtgaaaccccatgtctactaaaaatacaaaaattagccatgcatggtggcgcgtgcccatagtctcagccacttgggaggctgaggcaggagaatctcttgaacctgggaggccgaggttgcagtgagccaaaatcacaccactgcactccaccctgggctacagggtgagactctgtcaagaaaaaattttttatatatatatatatatatatatatatatatatacacacacacacacacacacacacacatatacacacatatatatatgtatagtccccatatttatatatctagttacctgcccttactaccaccgccatacacacatacatccctattttctcaagttgatgtaagtctctggaataagaacaacttttaaacttatcttgggggagctggaaggaaatggagagcaggcatggtaaagctttctcaggaccaggtgtggcaggggctgatcctcaagaaagttatttgcaggagttagaaactcaatgagagtctctgaaggaagcagggaccggcactggcggggaaatgcataacatgggaaatggcctcagggcttcactaggaaccctccatttgaaggtggaagtaccaggaagcattgtcttatttccatctcccctggccttttgtactcactctcccttttgaaggaagtgagggactagtgctggggagaccggagccagtggttttgattcatggcagggaaggaacaatgtacagacgggaatcctgtctccaggattaattagcctggtggatgggccaggagcctgtgtttctcccactgacctaagcagcaccttctataccccaggaggctctctgcaaaccaacggtctacagcaatggttaaaacagcagtgtgatgagcagccaagggcattccaagaagttgtgttgtttatccccaaactacctctccatttgtgtgaatgagtggcatgattcattttccataaacagcgtgggtgaacagaaggggaaaaaaatccaaaggctggggactggcatttcactttgtagaaactgccaaggaaaagttttcttcattttggtatccctctgagaagaggccaattctctgaaacaagaggctgtccacagctgggtcacatacactgagtctgagtcttcacacagacccattaaaactgtccaggcacagatgagaagatagaaaacagcagggaaacaagtgattgcaatgcaaactctacccagacataccctgaggtcttaaggaagaaactcctagctagcagggctagcaaaagaatcaaggaaggtctctgtcctggcttttctatttatcaccctaacatttaacctccttgatcaagatcttctagaacttaatccccagcatcctttggtatttgctgttatcaggaacaataataataatagcaaaaaaacaaaaacaactctgtgtttaattgcaggcttaccatgttcttgttatatacatgaatgactaatatagtttattttatactctctgcttttctgaaaggtaagtattattatcctcactttatgaatgagaaaaattaatctcaacgtgataaataactcttagcctctgatgagacaaagtagaacttgatttcaaatgcatgcctgtctaatttgaaagaatgcatcctttggaaaggctgtgatgcactattccttttatttgccttttaactttagggaaaatggtatgtctactcctctttccctcaacaactcctgtagctttcttattctgcatccttgattgcaagcagcatcttcttctcactctttcacttatctgatttttaattatcatatcaagtgaaacaccaagacatcaggctgggaggaactgtatccagcagattcaggaccaggaagcagcaagcaggtgacaagctcagtatgatacaaaaggcagggccatgaaagctgccatgctcagtgctaggaggtggcagtgagagctcttattggtcccaagagcaggacatgggaggtgccaactcagagtctagaggctgagcccaggattaagagccaggggagctgccaagtaattggagacaggagcatgggatgtatttgctgaaacaagctgtttggcctggagagccgatgtggggcatccagggagtgctggagtgggagcactttctcagctggctcttgtcccacgctgtcttaaaggcactacctgacaactgatactaccggtcaggcaaggcccatttcaggaagtcctctggaaccagccagcagacagggacacactgatccctccctggagcacttgtatcatctgttgtcggcactgcacacttagctcttagcaaacgtcatgctgtgtggttagttttcagtccccaccactgtgatacaaggtcctagagggcaggctgagagcaagaatgccaattacacttgtgagttggctttctccatccattccctgggcctctatctgaccctaagtaaaatttgtgaaagtggattttatcaactagctccaataattgtagttttagaatgatgtcctcaaatgtcagcttgcctgtggatctctctgtgtgcctgtccactgctagctcctggctcccctctctggtcactcctcatcactcttgggctctgccactttgccacctggcggttgtccacacactcctgccttcaccctttgccttctgttccccctgcatagaatgtatttccccagacatgggtatggcttctttcaccaccatattcaagtatgtgcttaagtatcaccttgtcagtgaggctttccctaaccttcctaccaccctggtttatactgcatagacacctgtgcttcctacgcctttgtatttccccatagaactcagcatgcgtcaccttgccatatacttcactctctctcccacaagaatagaaattataggagaagaaggatttttggctcttttttttttatggtcccaccccagccttccaagtagctgagactaaaaatgcacactaccatgcccagctattttttattttctttttttgtagcaacaggttctccctatgttgcccaggctggttgtgaacttctggcctcaagcgttcctcccaccttagcctaccaaaacgctgggattccaggtgtaagtcaccacacccagccagatttttgtccttttaacttactactgtactgtctctccaactcctagaacagtgcctggcacagagaagatactctataaatatttggtgaatgaatgagtaagtatcagctgggaaatgtcaaaattcagatatctgagacccactgatcccaaatattaattacttggctgacattctccacaatctgccctgagtattccttcctcatcagggtagactcctgcctcctttctctgatacagctgagtcctggggccaggcaggtccatgccatctgccaggttcccctgtacttgctgtgctatcaggtgccattgctgccttccaagaatccgtgggtcagcttgacattgtgggtggtgcagttgggaggggagggactgcattcattctctggaggctgcattcatttcctgggctggccacagagccagatgcctgcagggttctctctttgccagcagctcttcaaagacttgtgagcccactcagccctccagagacactcttcactgcaaagcctcaggcagcctagccaggggaccctggagctgatgccacctggaatccctaccaagtgtgcaaagcagccacattctgggacagctggattggaggagggagcagaggctgaggttggcttccaaatcttccaagcagtgatctttttagtgaattgcttgagggttctctggctagacctggtgcaattacttgtgctccccctccatggagtctctctgtgcctttgggacagcctctcccccttctcaccatcatctttggtgattcatggttgttttctgcctatggatcagctgttcattcctgctaagggtcctataattagacagagcacaagagctacagctccctgtttgtgttttgcccagagaagtctccagggacactcagacccctacctactcactctcaaatctattcactgactcccacgtcagagaataaagatgaacaaagattgatctccctagcggagtccctcctcccacctttatgattcccttcatctttcccctcccccagactgaatgtcagtgtttgaaagccaagcttaaccctggggatttgagagggagtggcagggaatgggttttactcaggtcaaaatgagtctaaaagatacataagcttaagtggaccttctttctttatttttttattaagtgggagggagttaattatctctctctgtgccataatttctattcctgtttgctgatcacccccacccaccttttgaaatgaagagtaatacaggaaaaaaacctatatccacgtttgtattaagcaaatattttctaacttttacacccagactaccatctaccattattctttgatgtctgcaggattttacttatacatagtaagatatcaaaataagtgctctattgattgaggacctacttcatattgtcatttttcagtctggaaaaggttacttataatatgacagggtaggaattttgagtgccagacagttagttcttgttggtttgtttgtttttgttttgttttgtttttacaaggagagaggtaaaactaacaaacaaaaaaataacaactaacaaaacacctagatataactggttgggagtgaagacactaacactcatggacatcaacaccttgaaatcccctgtgttgtcacaaagatgatgccactgtacctggtgctgtgaggtggtgagttgagttgtttggggaatttcctatacacattgcaaagcccttgtgagacatcttcagaaatgagcaactcagctcatgaagtcagagccagtgaggccagttgacaagcgatggtgaagtccagatccccacctgccttcactggataaaatgccttgtcaccatccatttccaccattccccactccctccttggactactcagatatgcttactcctgcagtcccagctgtagaactttccagccctatgcattcagttatcaatcaatggagatctcagctgcacttgggctggagcaggacaaaccagcctttctttatgccaacagggaatgcttgaaataacttgacacacaactctgattgatgcagccacagtttacactccacacttcagacggtttgaaatggctagaattaatagcctattataagatagtaggggggtgggggagttgggggtgggaggtctgggaaagggaggcaggagagagagagagacaaaaaaataccttttttatgatctcctaatttaaatctatttatttgatttttgcagagtgtgacatgaaggggggtactgggaggggaggattgttcttatcaccctgctgtgagtccactggggggctccagccagcttggcaccaacttaatgcatttttctagtaaatgatgcgaatccatgtggctgggcaaggaggggttaaagaggctagggagtcagggactgagggagggaagaatggcaatcgcttggttcacttgctttcatgccaggttctgctagccagctggagagaggggaaatggagtttaaaacccctggtaaggaatttttccttggtctgaacattgtttaaattcctgaagtgggtgatccctgtaataaataccttggactttgtaagacagatatatttactcaagtttaaagtttggatttgatggatatgcacttgggaatgcacgggatcggagtgtttgttataggttggaacccattcaatgcgcacaaggagttaagagaactccatttatagcaaagcagactgtcttcaccattctttgtggtcactatgtcaaagtctgtacttgatcccttatttcgaatatcgttggccctcaaaagacattaaatgagaaagagaatttggcccaaggtactcaaagcacttttttaagacttatgtgcaaatggagccttgaactaggtcacctgtcttgtatgtaggaaaacacttctttgaggagagagtagataatatgaagcaaaggacaaagatgaaggtagagccagaaagagctgaacactccagcttatgttctatttttcctgtaatgtcactgcctcaggactgattacatattgtaagagaaaaaaattcatcctatcattgggagtatggagtctcacaggacacaatgccttttgtccagattgaaacacttgctattcccctaaagaatgttactcaatcctataacttaaaacaagcaagccaggtaattccaagaaggccaggttggagtttccaggaactcatgccaactttgccctccttgactgtagaatcgtagggatttccccagagcccccaggtgaaaggcccccctgcccttttctccttggtgaatgacatgattccagcctgaccggcagagtgaacagttgactagccaccacggattctgttcaaccatttggtttggttttcccaagggggttcccatctaaccacaggcctatgccagagctacatgatcttgccaagcttcacggggtccatgtttaagggggtgcagcctcaggccactgtgtgcatgcccttctgccactgcccaacaacacagatggaattttggtttcccagcatgggaatgaatgcccattttccatgatgcatatgtgtgatgtgaaaaatcatctcaccttgggcttaaataggcctctcagaagcaagagccaagtacaagctggagactcctgttccatcttccctgttgaaataggttacaagggaatatttttcataatccacttacaatgaattttcctgctttggctgatgctcaagcccacacatcagtgactcccacgttccagatgacttagttgcaggaatcagaatgtgcctcacaaaataaaagatcaatataacatttgtttgagaaaccacattcctcttataggctgaagtacgtgatgtctgcaacagcagaaataaagatgtgaaaatattattttctatgatattggtattttaactgcctaagctcctaattttactataactgccaacataggtttttgtttttgtttttgttttgttttgttttgttttgtttgtttttgtgagatcctgggatttattttaatacattattaatatttaagttattttttatgcaatattctccaattaagttcattatttagttaggatttcactgtcacttgaggaatgtcacaatggaattggttataaatgcagaataactgctaaagaaatttaccaatttttcttgtgtattaatgtaaccagcccttaaaattgattgccagtcttttgggggtagcaggatgtcattcgccctcccttggaagtccataccaactttgtcttcaccaagttgaaaagtcctaaaaggttgtaggattcttcagagggagaggtgcagacttaggtgaactgggcctggattaaactctgatgagaccccagaatgatctgatccatcagtctgcttcatgtatcgtatgacttgagggcaccaagagaatcataagaactgcttcaaaaatttaaaatagttatttgggggacattcatttaaatatgccccgctataaatcatatcattagatacgtaaagttcccaatataatttggcaacataagctaattttgctgatgtaaacacattttagcctgtggattcctgaatacatagagtgctaacctagattcagactcgaggctgcatgtggagaatctcaaaggtaggagctgtgaattcagcagttgtttattagaattaaagtcacttaaaatctatacttaagaaggtacttaaaaattctctaggcttttcccaaatcagactctctcggtgtgggcctgaggatctatatatttttaaaattcaaccttgaagaatgagtaggatttttaacctcagggtgggcgggaatgacattccagggggcatgatggtttagttgaaaggcatgggtcaaggaaagataatgcgtttcatttacctggtttttgcagcagaacttctcagacgtttaatatgctgatggacatcataaagcatttgaagggtgcaacgtgtagcatttgccaaacctatttgaacatgtttcttgatcataggataaatgtcccttaaaacagattttgagaaattctattattaatattaagttattttctacgcaatattctccaattaagttcattatttaggtgagatttcactgtcacttaaggaaagtaacaatggaatcgattataaatgcagaataactgctaaagaaatttccagttactaatttttcttgtgtattaatgtagccagcccttaaaattggttatcagttttttgagggtggtgagatgtcattcaccctcctctgcaaatccataccaactttattttaaccaggctctaaagcatatttgaacatgtttcatgatcataggtcaaatatcccttaaaacatacttcaggaaattctaggcttaggaaaggagaagacaaagtagagagactccctgttaacactttctaagcttttagtcacacaagggcatggaaaacaaactctcctgtgttttcttagccaggagaaataggccaggctcctgccagtcatcattgctcttttggtgctgacctggccttgtttggtacatccctgccctgtttgaaatgcagtactcctgctccagacaacttgaagaacggaacgcattttttcaaagtgctagaggggggataaaaaaacaggcaaaaattgagacaagagccatttgtagggcagcagaatgagctttggcttttctgcccctagctcgggctgggaaaacacagagacctgaaggagctgaatgttaggaagaaaggccatctgaggcatgaattttaatccctgcttggcttcttgcaaactgtgtgacctcaagcaagtcactttaccagtccaaatcttggttgcttcatctgtaaaactgagttgtctacctacataggagttctctaaggaaccaatgaaatcatatttgtaagacgcccagaacagagcctggtgtttagtggacacatactaagcctaataaagcattccttccttccttcccaaaatctggaagcaattttctttaagctgactttgattcaagaagcattcatcgcacattctattatatgaaaaccagtagattgagctcatctcatagcttgatgtctaaccagggaaggtgttcgataaatacttttgtatgactgaatactcgtatgtgaataaataagtcaacaaagagaaccatagattcacagaggaagaagtgatttctgggggatgcatgtagccttctattcctcttctcatacatggagtattggtgggcactcttctggcctctctttctaccctttactcaacctgctccaagagagaagtgtagttactctgatagttcactagaccacatttttctaggaggcaaggtcatattctgtctctgagctacaagtagaatacagccaaatttagcagacctgccattctttgttctatctgttgctaggcgtgtcagcgtgtctgtggtcctcatccatgtttatggctgtgtaagggtactcaaggtctcttctgtaagcccattcttacctcctcacattacccaaatgtgcaaaccctaagattcaggctagaagccttcatctgagcctcaggcatccacataacattcaactaagcagttaaaacgaactttattatagagatgacactactgaaaatcaccagagtaaagtatttggcatctaatttataaaatgaaatcataggttcccccagtatgtagtgttttcattggtaaaacaattatactgttttcaatccttattaactctcctacaggcaacatatattggtattccccatgacaacataattagtattctaagcatatttttcaccagctgcttatgtcttcaagttaaaagtcaacagctaaatatataaaatggaaaaagcataaacagtaaaattgattttagtactcagaatgacttgattatctatatttatagtggtaattagagaaagacttaatgccttatataatcagttctttattgaaagtttcatgacacaggacttgatgctaatttaccttgtagcatcgaggaaggagtgctgttctctaagccacaccaatggctttagcttctaggttcattaactacaaaacatgttgccttacattatgtgtagcacattaagggctctttattgagcaactttcaaaggcagtttctattccaagttgctaacataatatatgcctttccccagagtccagttggctgtttgagtctagggaatgagtgatgctctttgttattagaaaagtaatgttaattctgtataatgtcaatatatctatagcataacacagcgaagaagtttcatttttcttgcatgaatgcctttttatctggaaagttttagagctattcctacatatttttaaaattctttttgtattctgatctccaggactggaggatttcccccaaagcttttttaaaaaaagtacacattttcataatagcaataactactagttatcaagcacgtactgtgtgccaaatcctttacaaagcactttatataaatagtgtgtcatttcttctttgcaacaacctgacaaggaaggcactgttatgtgtctgttttacagatgatgaaactgaggcttagaaagatgaagtgactaacctaagatgacacgacaataagtgggagcactactagttaagctcaggtaggctggctttcgaggatgaatttccaatcatccattacagctgtagaccagtcaagtgcaacttccagtgatcagatcactgcttattgcctattgttttctttctcttcttagcatgtacaaccattacgtatgcatgtatgaatgcatatacacacatatgtcatatatgtacgtatatatgtttttatatgcttatgtatagaggcatactcatttaattgtgccttgttttattgtgctttgcagatattgcattttttacaaattgaaggtttgtgacaaccctgcagtgagcctatgggcatcatttttccaatagaatgtgctaacttcgtatctctgtgtcacatgttgttaattctcacaatatttcaaccttttttgctattattttatctgttgtggtgatttatgatcagtgatctttgatgttaccattgtcattgttttggggcatcacaaagtgctcccatatgtgatagcaaacttaatcaacaaatgcatgtactctgactgctctgccaatgggcccttctgccatctgtctcctgttccttggatgtccctatttcctgagacacaatactgagaataggccaattaataaccctacattggtctgttagtgttcaagttaaaggaagggccactcatctcttactttaaatcaaaagctagaagtgattcagcttagtgaggaaggcaggtcgaaagccaagagaggccaaaagctaagtctcttgtgccaagcagtaagccaagttgtaaattcaaagggaaaattcttgaaggaaattaaaagtactactccagtgaaaacacaaatgataagaaagcaaaacagccttattgctgatatggagaaggttttagtggtttggatagaaaatcaaaccagacacaacatttcccaaagacaaaacctagtccagagcaagaccctaactctttgaattttctgaaatctgggagaggtgacaaagctgcagaagaatcatttgaaactagaagaggttggttcatgaggtttaagtaaagaagccatcttcataacataaatgcaaagtgaggcagcaagtgctgatggagaagctgcagcaagtaattctgaagatctaactaagataattggtgaaatggctacaccaaacaacagattttcaatgtaggaaaactagccttctattgaaagaagatgccattcatgacatttttagctagagaatagaagtcaatgcctggcttcaaaggacaggccaactctctcgttagaggccaatgcagctggtggtcaatgtcaaagccagtggacatttatcattctgaaaatcctaaggcccataagaattagactaaatctactttgcctgtactctataaatggaatgagaaagcatggatgacagcacatctgtttacagcatacggtttactgaatattttaagcccactattgaaacatgctgctcagaagaaaagatttcttttaaaatattactgcttattgacaatgcagctcatcatccaagagctctaatagagatctgcaaaggagattaatgttgttgtcatgcctgctaacacagcatccattctgcaacccatggatcgaggagttattttggctttcaactcttattatttaaggagtacatttcataaggttatagttaccatcaatagcgattcctatgatggatcctggcagagtacattgacaaaattctggaaaggattcatcattctagatgccattaagaacatctatcataaatggaagaaagtcaaaataccaacattagccagtgatatagtttggatgtttgtcccctccaaatctcatgtagaaatgtgatccccagtgttggaggtggagcttagtgggaggtgattggatcatgcgggcagatcccccatgaatggcttagcatcccttggtaatgagtgagttctctcaaagttagttcacatgagatctggttggttaacagtctgggacctcccctttctcactcttgctccctctcttgccatgtaatatgcctgcttttgcttcaccttttgccatgagtaaaaattccctgagacctcaccagaagccaagcagatgctggtgccatgcttcctatacagcctgaagaactgtgagtgaattaaacctcttttctctatacattacccagtctcaggtatatctttgtaacaatgcaaaaacagactaacaccaccagcatttggaagaagttgatctcagcctttgtggatgactttgagaagctcaacacttcagcggatgaagaaactgcatatgtggtaccaatattaagcaaactaaaattagaagtaaagccttcagatgtgactgaattactgtcatctcatgatacatcttgaatggatattgagttgcttcatatgaataagcaaagaaagtggtttcttgccatgggatccactctttggtgaatatgctgtgaacgttgttgaagtgacaataaaggatttagaaaattacaaaaacttacttgagaaagcagtggcagagtttgagaggattgactcttattttgaaagaagttctgctgtgggtaaaatgctatctttctacagcattttgtagaaagaaatattttgtgaaaggaaaagtcaatcaatgtgggtgaacttcattgttgtcttattttaagaaattaccatacccactccagccttcagcaaccaccaccctgatcagtcagcagccagcaacatagaggcaagacccttcaccagcaaaaaggttaagacttgctgaagactcagagatgattgtatgcaattttaaacaatattttaaattaagatatgtacattattttttagacataatgctgttgcacaattaatagaccacagtatattgtgaatataacttttatatgcactgggaaacaaaaaaattaatgcgacttgttttactgtgagatttgcttcattggaactcaacctgccctatcccaaggtaggcctgtttcctacatgcagatgatattaactttgattttgatattcaaaaccacttaattatatttgttgctgtaattcctcaaggcatatacacatatgcactcctttgtgcttcagtgtcatttgagaaaagtttcaaactttttaaatataaatcatcattctcgtgatctcatttgatcctcagatctgccctgagaggtcggtacatcctgtgctattgtctcatctgagaaatgaagcgacacgtccaaggtcagttcaccacttgtggtaaaactcaaaccagaactccccctcagctgttacgccagagtgttaaagtactgtgctgtcttccacagatcctcaggcacagaataacactctgggctgcacatgagctaacagaaggaaataaaatgtcaactctttcaagtaagcgatggaacaggaatctcaggcacagtgctcatgtaataccatttcatgggtgaatttgtcttttttgtggagaatccgccatctttgctttttatcaatctctgtccacgtagttaactagttcaccttgtaccaccttgaaaccctgacctaaactccaatcccaaatgtcatcccagggtgttatatggtacatatatactgatgtgacttcccccactagattgtgagttcactcctgtgatccagttttcagcatagagcctgacagtagaaggtctcaaatatttatccattcatgtatttgttctgcataaatttttgctgaatttactggcaattggaaaagaaatggagaaatagaaaaggaaaaaagtttgagacataaatcccagttttaattattttgccataggacagggtctccataacctttataaccccccttcccataataccaaactttgtgtggaaaaacatccctaagagcttctctgtcgaagaatgggtcagagcagggctggttgttccaaaaatggcctacaaatatgttctttggggacttaatgtgccctccaggacagtgggacctataaaacttgtaggagggaattctagggaggagactaacatggcaaagcaaactgctccctcccaccacagagttaaaaacaatgtccagcctttaagttgtgggaaagagaatggtgaaatcattctctgtctggcacaagttgcagactattaagtcgtttgggaaatgtggacttgtaccaatctacgagattggccatggccattttaatatgtttttgaaaatcagcaagtgcttaaaaacttgtagtaaaagccctaataaactaaattcgaccaggactctgccagaattgtatttacctcctgaagtggagggttaggaaaccgcattaaaaattaaagtgaaaaaaaaaataagaaaaagcaatagacccattagtttgggcagttgtttggtcaaaagaattaactgtccactctcaaaggcagctcatgtttcaagtgagaggtgagtttgtttgatggcacgcagttacaaataatgccatctccccgctttctacttttgttttgttttacaagtcttatttgtttttacaagggtaagtttggaggggggtgggtagttactgtagccagaagaataaatgctttgtgcattgtgcatgcccatgtagtatactgaacaagtactaataagaataaaattattggagcaaataaaatcacatatgctttttagtcacctgggagaggggccgtgccagccttcttgagcatataaaaataataattcctcacatctgaatagcattatagaacttataaagccctttcacttatattatcatgtttgatcctcaataacgtgagttaagaatgatctgtgttgtgataccattttacagttcaagagaggttaagcggcttgtccaagcagctactaagaattgatcagtcagtgattccaacaacatcctggtgccagagcattccacgttgtccactgtgacgcaaaagagcaaaaatgtatgaatcgtagcaaaaatctctaaggtcattttgtgtagaagaaaactatttggcacaggaaatgacttatcccctggctccctagctatcagagaaatggtctacaccaggaaaagagcacagtgctaaggatcacatacagcctgattcaggcacagactagctgcgtgttgcttaggacacacttgcaaaatgaggaactagtgtatggcatcctgttacctaaaggtgttgttaaaaatcgcacggggctgtagatggacaaaaacaagaaacggggaaaggattccctatttaataaatggtgctgggaaaactggctagccatatgtagaaagctgaaactggatctcttccttacaccttatacaaaaattaattcaagatggattaaagacctaaatgttagacctaaaaccataaaaaccctagaagaaaacctaggcagtaccattcaggacataggcatgggcaaggacttcatgtctaaaacaccaaaagcaatggcaacaaaagccaaaattgacaaatgggatctaattaaactaaggagcgtctgcacaacaaaagaaactaccatcagagtgaacaggcaacctacacaatgggagaaaaattttgcaatctacctatctgacaaagggctaatatccagaatctaaaaagaacttaaacaaatttgcaagaaaaaatcaaacaaccccatcaaaaagtgggcaaaggatatgaacagacacttctcaaaagaagacatttatggagccaacagacacatgaaaaaatgctcatcatcactggccatcagagaaatgcaaatcaaaaccactatgagataccatctcataccagttagaatggcgatcattaaaaagtcaggaaacaacaggtgctggataggatgtggagaaataggaatacttttacactgttggtgggactgtaaactagttcaaccattgtagaagacagtgtggtgattcctcaaggatctagaactagaaatgccatttgacccagtcatctcattactgggtatatacccaaatgactataaatcatgctgctataaagacacatgcacatgtttattgtggcactgtgcacaacagcaaagacttggaaccaacccaaatgtccatcaatgatagactggattaagaaaatgtggcacatatacactatggaatactatgcagccataaaaaaggatgagttcatgtcctttatagggacatggatgaagctggaaaccatcattctgagcaaactatcgcaaggacagaaaaccaaacactgcatgttctcacccataggtgggaattgaacaatgagaacacttggacacaggttggggaacatgacacaccggggcctgtcgtggggtagggggtgggggagggctagcattaggagatatactgaatgtaaatcacaagttaacgggtgcagcacacaaacatggcacttgtatacatatgtaacaaacctgcacgttgtgcacatgtaccctagaacttaaagtataagaatcaaaaataaataaataaataaataaatacattgcatgaggctaatgtaagttactgtgccttttgatattgcctgagaactcactggctttgaggtagctttttctatctatattaatgaggagctggtgggttaatttcccagtgtttctgtaacaagttatccaaaacttaatggctttaaacaacgtaaatttattctcacagttctggaaccagaagtctaaaatcaaaatgtcattgattttgaaaaaggcaaggaagaggaatctctcttaaaatcttcttccttctagggggtttaaaagatgttcctcttccttgcctttttcagcttctagaggctgcttatgaaataataagagataataattattttaagtattaaataagtatatgtttcttaaatatgtgtatgcatatgcatttcttattatatataagaaataaaataagatgtatatgtgtgtgtgtgtgtgtatgtgtgtgtgtgtgtgtgtatatatatatatatatatatatatatatatatatgaaatatccatattggtctctgctcccagttatttacacagagctcttgaaacacgtatgcttttctgagtgacaggggtattagaatcatcttttgtgctaatatttggtctctgacctggtctttgacacagaactcctaaatccctcagaatatcctgggtgataggagtgtcttttgccctaatgaggcaactcttgatgagctcctagatggcttcaggatgggggctagtcaccagaaagaccaaaccttgattagaagctcaaaattttcagtcccatttccccatcctctaaggagagcatagggactggagacagagttaatcaatcctgcctatgtggtgaagcctctgtaaatatccctgaactacagcttctgggttggtgaacacataggggtactgggagggtggtgcatctcgaggcaacataaaaaccccacacctcttccctatacctggccctttgcatctcttccatctggctgttcctgagttgtattctttataatcaactagtaaacctaagtaagtaaatgttgccctgacttttttttttttttttttgagacggagtctcgctctgtcgcccaggctggagtgcagtggcgggatctcggctcactgcaagctccgcctcccgggttcacgccattctcctgcctcagcctcccaagtagctgggactacaggcgcccgccactacgcctggctaattttttgtatttttagtagagacggggtttcaccgttttagccaggatggtctcgatctcctgacctcgtgatccgcccgcctcggcctcccaaagtgctgggattacaggcgtgagccaccgcgcccggcctgccctgactttttgtgagccattatagcaaagtatcaaatgtgaggaaggggatgcagggaccctcactttatagccagttggtcagaagtgcaggtgataacctgggacttttgggatctgaagttggatacagtctcatgggactgaaccctttaactgtgggatctaatgccagcttatgattgataaacagctccaaaaacactatctgcaaagtcccttttatcatataatgttgcacattcacaggtttcagatattaggacttggacatctttgagggggctatgattcagcctaccccagctggaataaacaaaacttcagtctgaacttgtaattctgctctatcattcataaatacaattctaaggcttgtggtttcaatggaacaaaatagagagcacggaagtcaacccacataaatatagtcaactgatctttgaccaagaagcaaaggcattatcatgacaaaaagacagccctttcaacaaatgatgctgggacaactggacatccatgtgcaaaaaaaaaaaaaagtattctctgatggtagtttgtatttctgtgggatcggtggtgatatcccctttatcattttttattgtgtctatttgattcttctctctttttttctttattagtcttgctagcggtctatcaattttgttgatcctttcaaaaaaccagctcctggattcattgattttttgaagggtttttttgtgtctctatttccttcagttctgctctgattttagttatttcttgccttctgctagcttttgaatgtgtttgctcttgcttttctagttcttctaattgtgatgttagggtgtcaattttggatctttcctgctttctcttgtgggcatttagtgctataaatttccctctacacactgctttgaatgcgtcccagagattctggtatgttgtgtctttgttctcgttggtttcaaagaacatctttatttctgccttcatttcgttatgtacccagtagtcattcaggagcaggttgttcagtttccatgtagtcgagcggctttgagtgagattcttaatcctgagttctagtttgattgcactgtggtctgagagatagtttgttataatttctgttcttttacatttgctgaggagagctttacttccaagtatgtggtcaattttggaataggtgtggtgtggtgctgaaaaaaatgtatattctgttgatttggggtggagagttctgtagatgtctattaggtccgcttggtgcagagctgagttcaattcctgggtatctttgttgactttctgtctcgttgatctgtctaatgttgacagtggggtgttaaagtctcccattattaatgtttgggagtctaagtctctttgtaggtcactcaggacttgctttatgaatctgggtgctcctgtattgggtgcatatatatttaggatagttagctcctcttgttgaattgatccctttaccattatgtaatggccttctttgtctcttttgatctttgttggtttaaagtctgttttatcagagactaggattgcaacccctgcctttttttgttttccatttgcttggtagatcttcctccatccttttattttgagcctatgtgtgtctctgcacgtgagatgggtttcctgaatacagcacactgatgggtcttgactctttatccaacttgccagtctgtgtcttttaattggagcatttagtccatttacatttaaagttaatattgttatgtgtgaatttgatcctgtcattatgatgttagctggtgattttgctcgttagttgatgcagtttcttcctagtctcgatggtctttacattttggcatgattttgcagtggctggtaccggttgttcctttccatgtttagcgcttccttcaggagctattttagggcaggcctgatggtgacaaaatcggtcagcatttgcttgtctgtaaagtattttatttctccttcacttatgaagcttagtttggctggatatgaaattctgggttgaaaattcttttctttaagaatgttgaatattggcccccactctcttctggcttgtagggtttctgccgagagatccgctgttagtctgatgggcttccctttgagggtaacccgacctttctctctggctgcccttaacattttttccttcatttcaactttggtgaatctgacaattatgtgtcttggagttgctcttctcgaggagcatctttgtggcgttctctgtatttcctgaatctgaatgttggcctgccttgctagattggggaagttctcctggataatatcctgcagagtgttttccaacttggttccattctccgcatcactttcaggtacaccaatcagacgtagatttggtcttttcacatagtcccatatttcttggaggctttgctcatttctttttattcttttttctctatacttcccttctcgcttcatttcattcatttcatcttccattgctgataccctttcttccagttgatcgcatcggctcctgaggcttctgcattcttcacgtagttctcgagccttggttttcagctcaatgcaacagaacagagccctcagaaataacgctgcttacctacaactatctgatctttgacaaacctgagaaaaacaagcaatggggaaaggattccctatttaataaatggtgctgggaaaactggctagccatatgtagaaagctgaaactggatcccttccttacaccttatacaaaaattaattcaagatggattaaagatttaaatgttagacctaaaaccataaaaaccctagaagaaaacctaggcattaccattcaggacataggcgtgggcaaggacttcatgtccaaaacaccaaaagcaatggcaacaaaagccaaaattgacaaatgggatctaattaaactaaagagcttctgcacagcaaaagaaactaccatcagagtgaacaggcaacctacaacatgggagaaaattttcgcaacctactcatctgacaaagggctaatatccagaatctacaatgaactcaaacaaatttacaagaaaaaaacaaacaaccccatcaaaaagtgggcgaaggacatgaacagacacttctcaaaagaagacatttatgcagccaaaaaacacatgaaaaaatgctcatcatcactggccatcagagaaatgcaaatcaaaaccactatgagatatcatctcacaccagttagaatggcagtcattaaaaagtcaggaaacaacaggtgctggagaggatgtggagaaataggaacacttttacactgttggtgggactgtaaactagttcaaccattgtggaagtcagtgtggcgattcctcagggatctagaactagaaataccatttgacccagccatcccattactgggtatatacccaaatgactataaatcatgctgctataaagacacatgcacacatatgtttattgtggcattattcacaatagcaaagacttggaaccaacccaaatgtccaaaaatgatagactggattaagaaaatgtggcacatatacaccatggaatgctatgcagccataaaaaatgatgagttcatgtcctttgtagggacatggatgaaattggaaaccatcattctcagtaaactatcgcaagaacaaaaaaccaaacaccgcatattctcactcataggtgggaattgaacaatgagatcacatggacacaggaaggggaatatcacactctggggactgtggtggggaggggggaggggggagggatagcactgggagatatacctaatgctagatgacgagttagtgggtgcagcgcaccagcatggcacatgtatacatatgtaactaacctgcacaatgtgcacatgtaccctaaaacttaaagtataattaaaaaaaaaaatacagctagtataatgtaaaagtgcataatttatttgtagcgtttttaaaaaaaaacaaaaaaaatacagctagtataatgtaaaagtgcataatttatttgtagcgttttaaaaaaaaatacagctagtataatgtaaaagtgcataatttatttgtagcgttttaaaaaaaaaaaaaagaatctagacacagaccttacacatttcacaaaaattaactcaagatggatcacagacccaaataaaaagcataacactcccagaagatgcataggcaaaaatgtggatggtctttgatttcacaatgactttttaaatgcaataccaaaggcacaattcatgaaagaaaatattgataagccagacttcattaaaattaaaaatttctgctctgcaaaagatactgtcaaaagaatgaaaagacaagccacagacttggagaaaatatttgcaaaagacatatctgataaaggattgtcatctgaaataaagaaatcttaaaacccaatgagaagaaaacatacaagtttatttaaaaaatgaggcaaagatcttaacagatacctcaccaaagaagatatacagatggcaagtgagcacatgcagaggtactccatgtcttttgtcactagggaacgaaaattaaagcaatgatataccactgtacacctatttagaatggccaaaatccagaatgctgagaacatcaaatgcttgtggggatgtggagcaataggaactctattcattgctgacagcaatgcaagccatcgtggaagacagtttggtgatttcttacaagaccgaacatacttttgctgtactacccagcaatcacacttcttggtatttatcctaaggagttggaaacttatatccacacaaaaacctgcacattgatttttatagcagctttatttataattgccaaaggttgaaagaaaccaagacatcctttagtttgtgagtggaaaaactgtggtacatcaggcaatggggtattatttaatactaaaagaaatgagctcacaagtcatgaaaagacatggggaaacctaaatatttattactaagtaagaaaaaggcaacatattgtatgattccaactatatgactttctggaaaaggccgaactatgaagacagtaaaaagatcagtggttgccagtggttagcagggtgggaaggatgattaagcagagcacagaggatttttaggtagtaatactctgtatgatactatagtgttggatacacattaatacatgtgtcttaaacccacagaatatacaacactgagagttaaccctaatgtaaactgtaaactttgggtgataatgatgtgtcaatgttcatcaattgtaacaaatgcaccactctggtgaggggggctaggcaggtgtgtgggcagaggatatttgggaaatccctgtaccatctatcaattttgctgtgaatctaaaactactctaaaagataaaaatctatttaaaacaaaaaacaacaatatagatgagccatcctttccctccttcctatcattcatctctgttctctatgactcatgtagacaactgaagatgtttcatgaacgaaagaggggagaagaaacagaagacaccttaggagcaggcacatgagttgcatctcttagctcccttttttgcattacaatgaatatttgatcaacctatttgaacagttcaccctaagagcattaatattcctttggccttcaaactcctccatctagattggcatcttccttggccctttcggaagttgaatggcttttttggtgctcccatgcactttgcacacaatacaaatagaacatttaccattttgaatgttaaaaactaacttgtaatccagaaatcatgttttctccctctctagactctatgcttctcgaagactgtgtttaattcatctctgcctattcaagggtctacctagctcctgcaggcaagtccttggtaaatgtatatgggacgagtgcgttatagaggattttattttacacaatcacaggtccagaggcaaattcagttcttactggttcccctttcttggcctccatctctaattgccttatttcctccatgtcattgtctctaaccctggtgtcaaacagccaatctttacttaaacaactagctctgtaggaaaacccaggacccagaaggaagtagatgcttatatactcaaagcaaaaagaataactctgagcccatttccttctcctcatcaagtaaactctcaagggtctatgacagcagccagactgagggcaaatgacttaaagtatcactcagcgtattattctctttgctctgcgagttcctacagcttttcagcttccattccataacagggcatgtatctttattgatgatgttcccatgtacttaaataagaagaaaaaataaaataaggagaaaaaataaaaaagctcaggcatagtatatatatatgccacattacagcataattagttcctccctcaaatattttaacactacttattaacataaaaagggatacttaagagaaaagatgatatcaagtaaagcattcaaaatgtgaagttatgggccttctcaccttggaaggctgaggcaggaggatcgcttgagaccaggagtttgagaccagcctggacaacatggcaaaaccacatctctgcaaaacaatacaaaaattaaccaagtatggtggctcgtgcctgtagtcccagctacttgggaggattgacttgagcccaagaggttgaggctgcagttatccatgattgcaccactgtgctccagcttaggcaacagaaccctgtctcaaaaaaggcaaaacaaccaccaccaccacaacaaaagtgaagtcatgacaccatttaggggacatgtagatataaagaattattgtttcctccaggtactcagtcaagtaattctactagggaatcaagtatgagaattgaaggtttaatcagagttgcagccaggaggactggatcaagtgcctttcaatcctgagaaagggccaggcgtggtggctcacatctgtaatcctagcactttgggacaccaaggcaggaagatcgcatgaagccaggaattctagaccagtctgggaaacataatgagacccctgtcactacaaaatttttaaaaaaaaatttagcagagcatggcaccacataccctgtagtcctggctactcaggaggctgaggtgggaggactgcctgaggccaggagtttgaggttgcagtgaactattaatgcatgactccactccagcctgggtgacagagcaagaccctgtcacaaagaaaaaaacaaaaaatcctgagaaggaagattccctgatgctctttttcattttgagctgccatagctgttctggtgcctgatagaatattaaggacttgggaagaagttatggcccatcagaaaggtcatgcacattgtgtcatgcaaatgaccctttctaacctggcaatttgaaatcctaatgtgagcaggtctaagtgtgtcttgatttgaattgtgtcggtatttacttcactgacacaactttactattggatatttcctagtacttcataaaaaacacttttgtgcttgttcaaatgaaagaagatttgtctcccaggaaaaccatttaaacatgtagaggctgcaatctcattttcgaatattaggtttcattttatgacatatcatgctgtttagtacagcgtatctatattaaaaagcatgaacaagtcagccttgttctgttccattcctgtccctctctaatgtacatttataaaaacacagacctatctgattctgcacacactgtacaatattttatcgattacagtggaacttagttatatcatgtttccagagactgagaaaagaaaacatagaaagtaggaaacactgaatttgattatgctaggcgtggagtttaaaagacctgaattgtggggaggtcttgtatgtgggaataataaaaataggttttactaaaaactacccttttacaaaccatcggatggaggtgtccctagtgtattcctttgtgtctagacacatagtacacacagcaaattcctagggaggctgctgttagtttccattttcttctgcattttcctcactgctaaactttagttaggctcctggcgtctctggatgattattccaatggtcttctaactaacctgctgactgcaggaactctctcctcagttagcaaatgctctgaaaaggacaaatccccttaaaaacactttgtcttctgactacctggatttatatccttcaaagacttttaaaccaagtggaaaataatttacatccaaagatcagctaaaccagcagtccccaacctttcttgcaccagggaccagtttcgtggaagacaatttttccatgcacaggggtgtgggaaggcagaggatgcctgtgatatgtgcctgtagttccagctactcaggaggctgaggtgggaagagtggtcgagcccaagaggtcgaggctacagtgaaccatgatcgtgccactgcactccagcctgggcaacagaaggagactgtctcagaaaagacaaaacaaccctaatgtgaactgtgcatgtgagggatctaagttgcacattccttatgagagtctaatgcctgatgatctgaggtgaagcagtttcaggatgattacagtggaacttagttgtactgtgtttccagagactgagaagacaaaacatagaagttaggaaacactgaatttgattgtgctaggcacagaggttaaaatacctgaattgtggggaggtctcgtatatgggaataataaaaataggttttactaaaactacccttttacaaaccattggacagtttcaggatgaaactgttccacctcatgacctcgatctctcacatgcactgttcacagtagggttggcgctcctgtgagaatctaatgccgctgctgatgtgacaggaggaagagctcaggcagtaatatgagtgatggggagtgactataaatagatgaagctttgcttgctcacccactgctcacctcctgccgtgtggccccattcctaatagaccacccaccaacaggtaccagtctgcagcctgggggttggggacccctgagctaaacatttgtccttattttcttctttttggttttatttccacatttcactctttagtgtatctgaaaattagtgttttctatgaggtaaaaattaccattttttctcccaatattcaactatttataacgccttttcttaggtgatcctttccttccccgctgatctgtattttctcccatgttgtgtaaggagatgtttcagacacctgggtctgtttctgggctctcagctccattctgttgtcttcctgcctattccttcccaaacacaactctgatgtaaggaatgtagctttgggaatgttttaatgtcaggtagggatcgctaccaccttctctaatccttcttcttaataattatttagctcttcttggtaacttgttcttgcagataaatgttagaatcatttaggagttctggatatattccactgagatcttggttgaaatttcattaatactaaaaaataaattttgagaaaatttatgtctttacaatatttgctctgctcatatgagaatatggcatggcccccatcttttcatctgcttttacgtctctgctaaattttttcctataagtcctgcacattttgtggttttgtagtttacctatagttgctttatgttttttgttgataatccaaatacaatttttcccattacgttttctagctcgttattgctgttacaaaaaaaaaaaaaaaaagacacagacttttaaatgtttatttcatactttatgaccttactgaactctcttctattccaacatttttttcagtcaattcttatgggatttttaagaagatattttctgaaaataatgattttcttttctcttttccaatacgcaaaggtcatgctcttcatttctgctctggttttcattacattggcctgaacttccagaacaatatgaaatcacaaaatcaattttgatctcccaactttgatgtttctctctccccagcccagcccctaaatatcctccttttcctggcatttgatttgactccacttagtgcattccagcatctctctgtgtcttggaaaagagctcccttttctaacactcaccccatgaacttcatcctctagtctgtcgaggtgtaccaggcagggtcgccagataaaattgaggacacccagtgaaatctgaattttcgataaacaacaaatacgcttttagtataaatgtgtcccatgcaatctttggaacacatttatactaaaaacctatttgttgtttatctgaaatttagatttcactgggaatcctgtgtttttctttggtaaatctggcaaccctagtgccagttccagttcctaagccaagttcacatctgggatcacacatctctatgcacatttgtctattatcattttgttaatattctgctataatgatatgttcatttgctacttcatatcctacgaagctactggcagctgatgtatcctaggcatttggttgttaaatgaattttcaaaatgcatgaatgatggcaagcagatcatcaactcttgagtattactggaacacataaactgtaaaatgttttgaggcttaagtagaggaacaaacaggtgtgaatgagtttactaactgccaaagaatccaagaaaaagagaaaagtacagccagtttttaaaattttcaaaagtggaattttatttaaattcagaagataagtgagtatatcacttcatcgttttattattagaaagaaccatgagcactgaaatggaatcaagagacccagaatctaattctgactctgccatgaattggctatttggccatgcacaagtcacttcaacttcctggttttagttgcttcatccataaaacaagaccattggaataggagtggttatcaagcattgttttagcggtgaggtccttagaaatgaaatattacacagaacctcaacatctaatgcagataaaagagagcaattctatttgaagaagatgcagcacgtccaaggtcccccagctcaactccctcttgcccttcggagtggccccttaaggaactctgtagaacattggacacccttgggctgtacagtcttcaagaccagcgtcccaatctgctttgacatatgtacatgttactgtagtataataatcaggtacagattacctgagaagatataggcatatagatatatagagagtaacatctcaagtaaccagtgcttgatatctactcttgattcctctttgatgaagcagaggcaatctattagtctgaagtcatcccaatcctctatagctacagtctcatttaatgaaaatagttagtcatagcgatgatcaaggtcatcagaagattctgaagcattgcataaaaggattaatttctgtggtatgctagatttctccttgcatctctccagaatagccccagtgggtaggactactgcaatcatcttctaatggtggagccctcacagtccaatctctttgcctcctcaagagtgaccctttctaaatgaccaccccatcatgtcacacacattgcagccttcccaccattactgttgcctttcattgctcttaatataaaatgaacagccttcagtgaaactcacccagtcctggatacctctcaagcactctctctctagccaggatgctcctcctcaaacccaccatagttcctcccaccatcaagcctttacatcgctgttcttctacctagaaaactattccctcctctcttttccaagttaacaccaactcatccagcagacctttgtttgagcgctcctttctcagctgtaagtagactgccttattgtacactgtcatagtggcccatatcctcacaatcacttgttatcattgtatatccatgcttgttcatatgattgtttgattaatgtctatcttctttacaaaactataaactgtaaaccccataagaatccagcagcacagtgtctgacatataatgtatccttaataaatacttattgattaaattacttatgagatagaaaaatgtgttcataccttttacaaagatttgccacaagagttaagaactaaggagtgctttagctgatcgaatgttatttgtgaaaaaaaaaaaaattagctattcagtatatctaattctctatatatctgtaatcgttgtgacttaatgttttattcataccagccacaagtggggaaagactactctagcgtttttaacacagaaaatttaataaagtattttcacaggggtaaaaccactgaaaaactaaataggagaccataaggcaactcgcaaattagcaatagcagaaaactaccactacccctgcactggaagaagaaataaactaggtccatccagtgggcactgagaccatggtgggaggatatgtccatgggagccagagcacagaggaaaaactgcttctgccagagatgcttctggaggcaaagtgcaaagggcagaaatgtcctatcttccccattcatccagtcctttaatcttttccaacccttttccagaggccagaaggcaaagtagcctgggaagcgattacacttgatatacaacagagcagcgggagagttggaaatggatgtgagctcaaagaaacagttaaccctcatggtacccagagtaaattatataatcagcaatagtatcacatccaagagttactgaattagtacctaagtgattagtaagagtcaaagactttctcctcctcagcctagcctagagcagggctttcctaactcatctccatgcctccagtctgggtggcttttgtatggttaccagcataatcttcctaaaatacttgtatgcacagagaggacactagtgggggccttcttaggttctccacagtttgtggaatattgaggaaacttcttatcctagcattgctagccttccagtctgcccctactctcctctccaattaacctatgtatgatgaaccaaagaagcccatacatcacccatgctcttcctgttccatttcccccctccacacccttttcaccattcacctattcatcttttggggaccaataaatattctgcctcctccaagaagatatccttgatttcatcagctcagatgaagtgattcataatggaagaacatggatttgtatagggatttgtagattgtcctttataatagggggtagataccatgaagtgtccatatattagaatattctggaactgttcaaaaaggttttgaaaaaaatataatgatgcgaaagaatgctcattatcatccaactgtaaaaagtaaaaaatcaaaactgtatttatacttttttaaaatacatacacatgcatacacacataaaatactaatgagaaatgttagctaaaataacccttattattttggggtcagggaattttgagttactatcactgttgtctttttagatttctgtggtatctaaactttctgtaactgctctgcttttattatgaaggaaaataaataaaagatacgatgaacatggactttggatacacacaggccatttcagactttgatgaatactctctctcttaattcataccatgatataggtaatctactgtaagtttccagggacattttttatttttatgaatatatcatcattctgaaggtctccctaaatatctaagatctccacgggacatacatacatcttaggccttttcatccccagtgcctcaaattgtagtgcacacatcccacacttttaataagggacataatgaagacatctcctttccccgtccatctcctgtgcccattcacatccatcgtcaggtgatgctcccctcatggtgcttttccgactgccctagccaagtctaggccctcaatattcattcctgatctctaggactttgatctccgtggccagtctccaaactgcccatcatactgtgttcagcttcattttcctaaaacatgacctcagggactgagggaatgcccaccatcttgagccggactggttgccatgccagagggcaaacagtttccagagtcttgcctcagcaaatgaatgagctgtcaaggaagtaacttcctgctcttcgtgtttgctctttactcattggctagaactagtcatgtgatttcattcatgtacaaacgagtcaggaagtcagctctccgtgtacctagaagctggagagacagaaatgttggcaaagaatgtaagtaactattatgaggctcaataaaagttggatattggtttaaaatacaagttaggcataatctagcccggggcatctatttttattaaaaaaagatataactagcaaaggaagctcgtagtgggatataaattgggaggaagaggggcaagaaatgggcaaactttcagactatgcctgctttttccctgaaatgatatcttaatggtcccccttaggaaatcaggcactgtttgtttgtttgtttgtttatattaaattaattaattaattaattttttagagacagagtctcactctgttgctcaggctgaagtgcaatggcacgatctcggctcaccgcaacctctgtctcctgggttcaagtgatcctcctgcctcagcctcctgagtagctgggattacaggtgcccgccaccacacctggctagtttttgtatttttagtatacctggggtttcaccatgttggccaggttcgtctcgaacttctgatctcaggtgatctgcccgcctcggcctcccaagtgctgggattacaggcatgagccaccacgcccagcctatttttatttttgagacagagttttgctctgtcgcccaggctggagtgaagtggcatgatctcaattcactgcaacttctgcctcctaggttcaagtaattctcctgtctcagcctccagagtagccgggattacaggcgcccactaccacgcccagctaatttttgtgtttttagtagagctggggtttcgccatgttggccaggttggtctcgaactactgacctcaagtgatctgcccacctcggcctcccgaagtgctgggattacaggcacaagtcactgtgcctggctcaggcactgtttatgatcatacattacggattggaaaccactgtcataatatagacatttcaaaatcaatgtcaaaccctttttgtgagctttgcccctgtacctcctccccatccgtaatcccagcaccactggttttaaaaactttgtactggctgggcgcggtggctcacgcccgtaatcccagcactttgtgaggccgaggtgggcggatcacgaggtcaggagatcgagaccatcctggctaacacggtgaaaccccgtctctactaaaaacacaaaataattagccaggcgtggtggcgggtgcctgtagtcccagctactcgggaggctgaggcaggggaatggtgtgaacccgggaggcggagctagcagtgagccaagactgcaccactgcaactccagcatgggcgacagagcgggactccgtctcaaaaacaaaacaaaacaaaacaaaacaaaaactttgtattatacccttcttggctccattctcctaaatcaagatttccttggctgcagaaggaggcttgcaaatcactgtgatttcaggactgaatgaagagtttatttctccgtggtacaaaggggtgactacccagtcttgttccccaaagcactcttcagatcaaagacattagctgagctactgaagtattaattagcgggtacaattgtcaaaaattagtttttgtgtgaaccaattaaaacaaaataattgggagttgtcagcacttctaaatatttataaaagttgatgcaaatatttatttacatatcatctgtttgcaatttttattgctcctgctctctgcaaagttactcataagccgttagatcctttctcttgatacttaaattaaaacctaaacttattctactcaactgacagaaagctaaaatatttttgtttgaattcatttgacaatgtgtatttttggcagtgtgtttatattcctcatttataacgaaaagtgatactatagccatcccttcaaggagaaatttctgatttttttttcatagccaattcattctatttttccatgtggtattcattaagtcattctcaactttgttgattttcattatatctatagagtgttaaaatttctttcacacttctgcaattggttagcaatattaggccgctttgcttgacatcttttattgtgcatcaaatctacactagtcctgaaatatcaagaaatgtcagaatctcttggttaataatccctcccctacaggagaagtaatcaccctttcctcttcatacatcctctatcagatcacaagtctcttcatcacctcaaagcatgcttccatccacattttccctgccattttgaaatttatttttctgcttttcctgtctttgagaaataaagatcctcatgactttataatgttaacatttgcattaaaatacttaaagctgatgaagtttattattcctattatatattaaatttaaattcatgataaaaaattttggagaaaatgcccaccacttaccaatagccctagtatatatttcagtgtatttccatttatagttttgtctgtatatagtattttatttgctatgttttcgtgtaattgtcatattattatctattcaattttcttctgctttattttccattatatcatgagcttttcctccaagtaattacaactgttcataaagttctcccctccccatggcccatgattacatgatagtcccttagtagatggatgtatacagtttagttgagcagtctcttactagatttgagaagcacaggatggagtttgttgcctgaatctaactattcaaccccctctttctgctggtaggaaatatgcatgaagaacggcaaagaagacaatgggatggaaagtaccgggcccacactgtggttatcagctatggatcacagtgttatctgggtgagaagggttggcagaaacacctggaaaaaagagaaaatgtttttggtttcagtttcgtaagaatgctggtctagcattcgtgacctgggagcataaataattgaacatagaaattttgtgccaagcgatatgaagaaattaatactatccccgtgcttcccatatcctttggcaagagatggggatgggcccatgcatcctgtttcctttctcccagactggcctttgagacactcctctctacttgcaaagttaagaaatttcaaaggtggcctgtgtctctgggtcttcttgtgactcagttctatgctatacattttaatgtttttaatttccattccaggtttgagccctacatgttgccccctcctcaatgctcaatcaagggtaggtttttacaatagcccagcatcctctacctctcagagcagagtgccccaagagggagaggcccctgtctaagcaaggtgcatggttgtgccttccccagagtttcaatcttgttctactttttatatttctccatctgcagcagaatcacaggaggcagtatctattgtctttgcttcctacactggaattctgtagactagtgcttctcaaaatgtgtcccctgaacagcagcatcagcatcacctgggagttcattagaaaagcagattctcaaactgcttgcagacctattgtatcagatactctgaagctggggcccagcaatctggattttgacaagctcttcaggtgatcctaatgcacactgtgtttgagaaccactgctgtagtcatgtctttgagtgatgcacctcctctgctggtgtagttatctcaacagatcttccaactgaagctcttacggatgcagctgcagctggcttgcttaggtaggcattccatcctctaccatgtgcttttcctttccttggtccttaaatctccaggccttgattgaattatgctacttcattgatagccagaacattcatctctgccaccttcattcctattgcagtggcaaatgcctctgctgtttcatttgtcttctcattctccactcttttcagacaaactcagctgtttgtaaaggtgtaatattcttcctaatttggctccctcccttttccatatatggtgctaataccctcgctggatcatagcacctctctcctttttctttctctttctctttgcttttcatccccattcatttgttttcatcatgacactattccagattttgtccttttagatcctccttaataatagatgtgaagccagtaacttcagaagctgccaaaatatccatagtttaagcaaatcttgtccacgtctaactctccaagcaggatacttgtacccatcagcgcaaaatctgactccatctggacccaaatattgtagcccagactggctttccttagtcaagatttctattttttcttatttgagacagagtctcacttgctctgcacccagactggagtgctgtggagcgattttggcttgctgcaacctccacctcccgggctcaagcaattctcctgcctcagcctccagaatagctgagtctacaggcacatgccgccaagcctggctgattttttatatttttagtagagatggggtttcaccatgttacctgaccaacaccaggctggtcttaaactcctgacctcaggtgatccacctgccttggcctcccaaagtgctgggattacaggcatcagccaccatacccggccgttagacaaggtttctcaatctcagcactactgacgttttggactagataattctttgttgtatgtgcattataggatttttagcaggcagtaacttcaccccctccctgcccctcaaaatcctgattatcaaaaaatgtctccagacattggcagctgtcccccggggataaggtgcaaaatctcctaggggtaaagccagtgccttagtctgtctatctcattctccctgaaccttccattagaagattacctgcatgcagttcctcatgatatccgctgatcctgccttactgctataatagctgtgtcatcttggcactagtgaaataatccctgaaaaatttcactctgatcttcctggtcatcctttatagtccaatacaaattttacatccctattcagtgtggctgtcctattcctcaatgcagcagctttaagagtacatctcctagtagtcccccacatctggacaatctttcgggacagaggtctcctttcttttctttctttgcttgttggatgtttaggcaccagtcatgatgcctcttttattttattattattattatttttttttaagacagagtctcgctctgtcaccaggctagagtagcacgatctcagctaactgcaacctccgcctcctggattcaacccattctcctgcctaggcctcccgagttagctgggactacaggcacatgactttaagagcatttaaaacttttcaggtttatatcctccaacctagtctctaaaataacaacatttttcctaaagaagtaactccttttcttccattcatcaaagcatcttccatcatttttctttcatttccaccggctcgtgttctaaatacaagatcaaagcctgtggtttaaacaattccattcttccttacctctctgagcaaatttaccctagtgctcttatcctattgacactatttcaaaagatagagaaagaggaaatcctttataaattgttctatgaagccaatatcacccaaataccaaaaccaggaaaggatttaacaaaaaaagaaaactacagatcaatatccctgatgataggatatcaataggataacagcactagggtaaacttacttagaaggttaaggaagaatggaattaccctagtgtcaaagagacagattgtcaagaaaacagccttttaaatatacttcttggctgaatgcctgaagataacaaaccaggagccccaattctctttaaccattatctgaaacagagtctcctaaatcagaggtcataaccagatatgcatttaataaataatatcttatataagaaataagctgtattgtttttaggagagtgactttttttattatttcaataggcttttggggaacaggtggtgtttggttatatgaataagttctttagtggtgatttctgagattttggtgcaccatcagccaagcagtgtacactgtacccaatgtgtagtcttttatccctcacccctctcccaccttttcccctgagtgcccaaagtccattgtatcattcttatgcctcgtgtcctcatagcttagctccccacttatgagtgagaatatacaatgtttggttttccattcctgagttacttcacttagaataatggtctccagttccatccaggttgctgcaaatgccgttaattcattccttttcatgactgagtagtattccatgatatgtatattatagatagatagatagatacatagatagatagatagatagatagatagatagatagatagatagataatgtatgcatcacattttctttatccacttgttgactgatggacatttggacttgttctatatttttgcaattgcgaatggtgctgctataaacatgcatgtacaagtatcttttttgcataatgacttcctctgggtagatacctaggagtgggattgctggatcgggatggtttattgacttttagttctttaaggaatctctacacttttccatggtgattgcactaatttacattcccaccaacagtgtaaatgtgttcccttttcaccacatccatgccaacatctattattttttgatttgttgattatggccattcttgaagaagtggggtggtatcacattgtggttttgatttacatttccctgataattcatgatgttaagcatttttttcatatgtttgttggccatttgtatatcttcttttgacaaatgtcgatttatgtccttagcccacttttggataggattgtttttttcttgctgatttgtttgaattatttgttgtattagtccattctcatgctgctatgaagaaatatctgagattaggtaatttataaagaaaagaggttaattgactcagagttctgcatgtctggagaggcctcaggaaatctacaatcatggcggaaggcacctcttcacagggtagcaggagagagaatgagagccagcaagggaaatgccagacacttataaacccatcagatctcataagaattcaccatcacaagaacagcatgggggaaaccgcccccttgattcaattacctcccatcgggtccctcctatgatacatggtgataatggggattacaattcaagatgagatttgggtggggacacagagccaaaccatatcacttatagattctggatattagtactttgtcagatgtatagattgcaaagattttatcccactctgtgggttttctgtttactctgctgattatttcttttgctgtgcagaagctttttagcttaattaggtcccatctatttatctttgtttttgttgcatttgattttgggttcttgattatgaagtctttgcctaagccaatgtctagaagggtttttccaaagttgtcttctagaatttttacgatttcaggtcttagattttagtctttaatccatcttgagttgatttttgtatagggtgagagatgaggatccagtttcattcttctacatgtggcttgccaattatcccagcaccatttgttgaatagggtatcctttccctactttatatttttgtttgttttgtcaaagatctggtgaacgtaagtatttagctttatttctggcttctcaattctgttccattggtctatatgcctattttttttgtaccaataccatgctgttttggtgactatggctttatactatagtttgaagtcaggtaatgtaatatctccagacttgttctttttgtttagtcttgctttggctatgcaggctttttttggttccatatgaattttaggattgatttgtctagttctgtgaagaacgatggtggcattttgatgggaattgcattaaatttgtagattgcttttggcagtatggttattttcacaatattgattctaccaatccatgagcatgtgatgtgtttccatttgtgtcatccatgatttcttgctgcagtgttttgtagttttccctgtagaggtatttcacctccttggttaagtaaattctaagtattttaatttttttgcagctattataaaaggggttgagttcttgatttgattctcggcttggtcgctcttggtgtatagcagaactactgatatgtgtacattaattttgtatcctgaaacttttctgaattcacttaccagttctaggagctttctggatgagtctttagggttttctaggtatatgatcatatcatcagcaaacagtgacagtttgactccctcagtactatgttgaatagaagcagcgagagtgggcatccttgtcttgttccagttctcgggggaatgctttcaatttttccccatttagtataatattggctgtgggtttgtcatagaaggcttttattaccttaaggtatgtcccttctatgatgattttgctgagggttttaattataaagagatgctggattttgtcaaatgctttttctgtgtctattgagatcaccatgtactttttgtttttaattctgtttgtgtggtgtatcacatttattgacttgcagatgtgaaaccatccctgcatccctggtatgaaacctacctgatcatggtggattatcattttgatgtgctgtggggttctgttagctaggattttgttgaggatttttgcatttatgttcaacagggatattggtctgtagttttctctttttgctatgttattttctggttttgatattagggtgataccggtttcatacagtaatttagggaggattatctctttctctcttttggaatagtgccaataggataagaaataagctgtatgaagaaatccagtttgagaccaggagcctgtgggcaggctacatgaatgagaaggttagtttttccgcagtcctccttgagcctatgcaactccatacaaaagaaaaaggaacccaagctggatcagctgagctagtagttccagtgcctagcactacacccaaaggcgcaaaccactcgctctagttctttaccttgcatggaatttagctggtgttttttttgctacttggtccaaataacacaacgttggtctcagcagcacatttactacaagtcattgctaccaaagcaagccagaaactaagactggcattgcccattcatgctaaagctgttcacaatagctgtaccaagagcagcagcctcacatctgaagttctttgtatttattccaggcagtgcactaacttattaggattgagatgctaatccttcaccccctcttcttcactaaatggtatcaaagtatcaactttattgatagccagggagtatccagtaactttaacatacagagcagctgggacgcttgactaaagaagccagaccagggtttctaactacccttctctgaattgaagaggctggagctggcaccagagcaatgtgactcaaccatcccgtcacaggctgaaaagctggccccaagacagcaggcccctgacttgcagcattaacacaggaaccccggtctctgtgcacacgagcggtggctgtaaccaacaagcctaccccctatagaaacatggcccacgctggatgcctggtttttcacagtctagtaagacaatctcctcctagacagaggagaaagtaaaagggtgaagagagaagtcagtcattctcacttcacatccctcattcatatgtgggagtgtggaagcctccacctcaaggaaaacagagggaggcaggaggaaggagaaacatttctccctcttatctatttaagctatctacacctttcccctgatttaagaaagctttgctatgtaccaggtgccatcctaagtgctgcccatagagtaacacatttcaactttctaacaatcttgggggaagactaatatgatctctggtttacaaaggaaattgaggatgaagtaatttgggatttcagtccacataactcttaccccaaaagctgttcttaaagcaataagcacatggctatttaatatatgctgaaatccctttgagttcacttcagttcacttaaacatttcatatgttagggatcgtactgtgcccagggaggcaaaggatgggaggacagtcctgaagacttgttcttaacatatatccacacatcccaaatggacattcttgtgccccaggaagcaagagagtagtatggcagaaagtttaaaactagggtgtctcttactccagatgtaggtataaaagatggattgagtgacctcagtggcaattaatttaaaacattttagtattaacacaaactagaatgtatttgggagcagaagcacaattagcctgtatttattaagagaatacatcagacttcacaaaaatgtggggaggtctctttgtcatatcctgaaacctctagggatgtgcctttaactcacctctgttgtagagctcttttagtagaaaacgtttagaggaaccaaatgtgcgttaataagaatacatccaagatacacagtgatgatctctgtctgagatggtgaagcttgagggtggaggacatcaagaaaagcttcgcagaggggctgctgcctttctaagccaaaatttgtcaaagagtaggaaaagcaagttttgaaaatagataagccaggagtgtggcctgagatagttacatctctgagattacatctttcttgtattaaaaaatgggatgatgctccctattgcacaggtgatttggagattcaaattagataatgcatatgcctcatacatacatggttagcgaaaaagaatgctagtgtctcccccgtcattctttcttcaactgcaggtcccactaactcctcattctctctaacctggtttccactccttcaactctgcaaaatatctttctctaagatttcccctgacctttccatcactaatcccaaaggctactagtcagccctcattctctcagacctctggaatatttaacccacttgtcctcttcagcccatttgagtctatttctcctaatggtttccattatctgctgttgttgtcctctgtggaaaaaaatgggctaacatgcaaacaaataatatacagctattaaaaataaggatgtatagcaatgtgtactgatatgtataacccaattgccccaaggcctctagcttttggggcagtaaccctttcctttcataaccaagttaaataaataagtccccatccacataactggaggaaatccactcacttttccaatatctctgaagatttcctgcatgatgcttatgttcacttatggttatctatcatcctcgtctccaaactcctgcctctggtatagagtcatcttttgtggccaagtaatttgggctctgtacaaggaagctgtgtactttagccctgactggggatgatcctggagcagcagagcaccgtgcttaagtgtgagagcaccacactgcatgagtccagatccagaatctatcgcttaccagctgtgactttgggcattgtatttaacttctctgtctgaccttcaccacacccagtttcctcatctgtaaattgggatgagaatagcacctaccctacagggttattgtgtgagaaagcccattaccaataaggtgagcagacacactgagaaggctgagacagaggtgagttttctcaacttagaataggggtccagaaaacacaatgaaagggacaagaacaggaagatggaggggcatgggcccgagaagaaagaatctgattgagacaggaaagaaggagctcagggtagcccaagcataggtttttcacttggcagaggaggtgcgattcatgtagatgaaggaatcagaaaactgcaaaactagttgggcacagatagggccagctccatgggcttgcactcagtgaagccacacaggaccctgtgctcagtttaatgctctgctgtcactgtcttgaaattcttaataattttataacatggggcaccattttttcattttttcacagagccccacaaatgaagtacctggtcccgggcacaggtatcggtgccagaggcagcgtgggtgggaggctgctgggcagacagaattgtgttgccggagaagcctagaggttcattcacctcactgcactctattgaatagccatgacatgttgaatatgctagacaccatggaggataaaaagatgagtaaacagttgcctgagtttatgctccgattcataaggaattcaagccatttactctcctgttagaagggttttagagcagcatcaattgaggtcaccttttgtgagaaagaacttcagtggggcttttttcccccaaattttatgtatgaagccttcataatattttgtaagtggcctcaaagaaaatgttctattaaaattgatagctaaatatgtaaacactgctcattgatcagctttcatattatccacagcagttttgaaagcggatcctttattccttgccaaaaactactgctttgatattggaataactaatccttggaaatttattatttaattataacatttggacagtagcctacgagacatgaaagatttctgtgagtctgtattgtcagctgacaacttggagttagagatttgaaatgtctgaaagttgaaaatattcagagtcggatcataatgatgtcatgtagaaaagatttgaatataaatggaacttcaaggcatcattggagagtcttcagtcaaacagctcttactctgcctttttattctaacagggttattacattgaagtggctagtgcagaaatcaaagacctttctaaatgttgatgtcagttaatcggagaagggtgatttccatagatgatgtgctctgctagaaaaagcataaaaatgggagccaaaagacctaatttctattttttaaacaaggcacactcctctgtgcctcagtttacctatctgtaaagcaaagcctcaggtggaggaccccacattgttaatgatgccgctctttaggtgaaactctgcccagatcagcctaaagggcctttctggcctcctacacctcaaattcagcaacccatgggataattaagcttactgggaattctagtcagagaaataatgctcaaacaaggaaagcttctattgtaggatgtgaaataaaaggaagaaaaagaaaaatataaaaagaaagagaagatgacaatggtgcagtcaaagcttataagcttaaaccccacacttaaaatctctgcaaaatcctgggagataacattctctcacccacatcaggactttaggacaagggaggaatcttactctacagaacagtgaataattgaggattgaatacgaagcatccctgtcattaaaggacctccctccatccttccagccagcaaaaatttcacactgccctctcttctccagagatctcacctctctactgttcaacaaactccccctagctgactttaggaatttcatccctctcactgtcttctgtagcagcatttggctcctagaccaccaattcaagatctagaccaactgtgcatttgctaagtcaaagaccatttcctcatggtttcacttttagtgactccaaagtgttagcagagttcttcaaaattccaccgcattgtgttgaacagaatgcatagagcagtggttcttaattgaggaggaagggcccagcaattgtgcccctccagcaacatttgacaatgttttgtgacatttttgttgtcacaaatggcgaagaggataatactggcatgtggcagatagaggccatggacactgccaaatatcctacaatgcacagaacagcctccacaacacagaatcaatcaggccccaaatgtccatagtactaaggttgagaaaccaatatagaaatttattttcccactgttatgagtaagttcatctccccttcaaaggcaaaggaagctagtcagtttagcttttgaataataatttttttcagcatactatgtttaaaaataatttgtacttgtctttccccagttaaggggttttgggtatagaacttttaaatgatgtctgtgttccctgaagaataattagtgacttctagatttctagcactattatctctaatagatttacttgctaggatctcaacagttacatgtcccagtggctccacaaattcaacgtgtctaaaactactttggccacagctatagcttagaacttcatcctttctcacctgcattctacctcctagtgagtcattagattccaacaaaatcttctctcatattgctcatttctgtggctaaccatatcaaccaccccattctccaggcatcacctaatcccctatccacatccaatagatcacctggtcccgcaacctgtttctccttagccccttctctctctctctctctctcttccccaccctccctccctcccctcttccctcccctatgttactcctctgattcagttcctcaacacaaatatctgggttaattaaataactccttctgactattcctttttccaagctgacctttataaatccatgctgtacaaatccattcatacttcttccctattttaggaaattttaaatacatttcttggctttcagaataatgttcaaccctttacctggctgagatgatctaactcttgcttgtctctgtcccatctcttttcactcttccatgtggaattctttggtctaacttttttgagctactttgtacttcagcacatgccctgtctcggggacttcacacatgttgttttcagcaaagaatactcttttccaccttttcttcttgcccaacacctaatcatcttgaaatctcagctctgccatgaacatcactgctctgggagagtgtctctggatcaccagagccatccttcaccatgtgtttccctcaaattcccttggaataaagggtactttcatcacataaatttgtgacagtccctctccctggaattcatacccaatattagaatattacaagttctgaaaaaagactgccataaaaagatttcttgatctttgatccaatgtttcccaaacttacttgaacatttaacttattttttctgcaaacctattatcatctttttttggaaaattttgccttcatctgatttaggaagaacttcctttgctcctataggtaccccaggcataggtctattacagtacttttcacacatccctgtaattgcagagtcattttctaataggtctcatatacaatagactgactacaaatgcctcaataataaaataatcaccgtgtttttatcagcattatacatccaatacctagaacacattttagatatctgataaatatttgataaataaatacattattggacaaaggacaatatagttcattactattaataattcacctatgttaaagagtaggtgcattttttgattatttgtttttgtttgtttatttttttttttgatacagagtctcactccgtcacccaggctggagttcagtggtgtgatttcagctcactgcaacctccgcctcctgggagcaagtgattctcctgcctcaacctcccaagtagctgggactacaggtgtgcaccaccatgcctggctaatttttgcatttttagtagagatgggattttaccatgttggccaggctggtctcaaactcctgaccttagttgatgaacccaccttggcctcccaaagtactggagttacaggcatgagccactgtggccaatcaatataattgttttgataaaatattttaatattcaagatagaatgtaatttatgatattgacatgctttctgagaatgccatgtttaagtgaatttcttagtgtctctatcctgaagataagggtttatgcttggtctggcttcttaatctgggattggcatggaaatctttttattgttttgggagtcagttttgaatttgttgctgttgttttgtgttttgttttttaagaagaccacaactcaactgtgagttatttggggtcattttctgctccaatggcggctactgaaaccagtacaaactgtcagagcagtttcattaaaggtattaggaggcccttggctttttaatattaagctcaaatccaaaatgaccttaaaatgcagtaacattgaagtcagaaaatctgtattctagttcaaatcacttgcagcatgatttggagaggatcattaaatctcactgattcttgtttcctccagtaacttagtatgctggtaaacttattctctgtcttccgaaggtgatgtgagaattacatgagatgatctatggaaaaactgtgtaagcttgaaagcattcaacaaggcactcccaaatgaaatgcaagcccctcaaagggggaggtcatcacttattgatcactctcatgcttaatacaatacctggaaaaagagatattcataaatattgaattaattaatgcagataataaaatgataaaacagtagccctgaagctatgttaatgcaatgggaacaaaaacaaaacacatttaaatattgtactagtccagtctcccattattataaagaaatagcttctggatgcggtggctcacgcctgtaattttagcactttgggaggccaacttggcaggtggatggcttgaatataggaattcaagaccagcctgggtaacatggcaaagccccatctttattaaaaaaaatacaaaaattagctgggtgtggtggggcatgtctgtagtcccagctacttgggaggccaaggtgggagaatcacctagaccagggaggttgaggctgcagtgagctatgatttcaccactgcaatacagcctgggtgacagagactctatctaaaaagaaagaaagaaagaggaagggaggaaaagaaaggaaaggaaagggaaagggaaagggaaacggaaaaggaaaagggaaagggaagagggaggaaggaaggaaaggagggagggaggaagtcaggaaggaagggaggaagggagggagggaggaaggaaggaaggaaggaagggaggaagggagggagggaggaaggaaggaaggaaggaagggagggagggagggagggaggaaggaaggaaggaagggagtgggggagggaggaacgaacgaacgaaagaaagacagacctgagactgggtaatttataaagaaaagaggtttaattggctcatggttctgcaggctgcacaggatcatgatgttggcatctgctcagcttctggagagacctaaggaaacttagaatcatggcagaaggtgaagggggaagcaggcaggtcacatggccagagcaagagcaagagagagagagcataaagatgccacacacttttaaatgaccagaactcatgagaactcactaccgtgaggacagtaccaagagatggtactaaaccattcatgggaaatccacttccatgatccagtcacctcccaccaggctgcatctgcaacactggagattacatttaaacatgagatttgagtggggcacacatccaaactatatcaaatatataaatatatgccatatttatacatctgcttgtatatatgcctattgatgaagggcctgaagtagatgaaaggtgaccaaattatgaaaatttataaggaaaattaaatgtcaataaacattagaatcaaacagagccttatacgatgtacaagaaattaatactttttttaagaagttcagtgatagccagatataagtgtataccaagaacaattttaaatggttaaaaatacattcaaatattcttatagcaatcaagatatacagaagtccaaatataatttgaagtggttggaaacatggatgaactttacctgaagaaactctctcccagcattctgcagatgtgacaaagcgatttcgaacacagttatctgtagatgggaaaagctgaagctcggcctacatttgtttgcagtacaggagtccccaacaccctggcttgcaggttttggaagtggtggtcagattcagccattggtgggcatcttctggacaccatcatttacagggctggggaaggtgagggcactgaagcctgggaaaatgcctgcctcccaggaaacagggaacacaggctctttttctcttcagtccaaggggcccaccccatagagcctactgccctgtgtggaaacttgtaagaaatgcagaattccagtccccaccccagaccttccaaatcagaatctgctttttatcagggtctcaggtgatctgtggacacattcaagtataaggagcactggcctcagtggctgttctcagcaggactgcttgttttagatgtatggctgaggaggagcccaaaagactctttttgtgtaacacgaagagacttgccacgctctgcacttgcctggaggatcctgagaacttggaggcttcccctacaccctcagttgaggggttctagcctaccaggctgttcaccaggaaaatattcctcctttgcctctcacaacttgcagacccactactagttaggagaccccaaaagcctgcctacatgtgtgctgaggacttatttcactgtaatgggtcagaaagatctggatgtttgcagacaagtaacagtgaggagaaaaaatgcacaaggcattgaagatgactcagcagtttgaaggaggaaagaacaacacaatcagaacaggtggctgtctgtgagatagtcttaaagaaagaaagacaaaggacactaaaagagtataatgcaaattcctagggagactagggaaattattacaaaggaatgatcggagaaaaagagagttcttgaaactcaaaaatattgctgaaaactgaataaggtatcttgaagttcaggtggaagattagcacacagagaagaaaaacttgaagaaatggaagttatgcatgctaagtgaaaaatacacatagaggacacatcttattgttgatagagggtgaatagtttcaaccttcttgaagagtgatttgcacaacccatctaatagtaagctgcatctaccctagtataaagtacttgcaattctaagaactactttagagtataagaccacacgtctaaaagtaaatgttcaaaatgcttggtcattacaagcccactgtaattgcaaaaaattactaacaacctaaatgtctatgaatatgggatttgttaggacatgtccataaatggaatcctacttagccactaacaagaataaggagatctctatatactgacttggaatctgtgtccacaaaaataccattaagaggataaaagcatattatagaaaattatctagcatgagcttgtttttgttataaaaattttcatgacatacatatctatggataaaagtttatatgcttatgctttcataagcataaaaatatttagaaggataacctcacatgctgttgatagaattacttctggaaaacgggggtgttgggcaaagcgttcacttctttgtgtgcttcaaaataaatctgtgcagttctgagttcttttactttatttaagtgggtttttaaatattttctaaatgtttgataatgaaaattgcttatttcgattacaaatatttttaactgttaaaaaggtataaagaaatcaaaacacaaggagtcatttataaataaacacgctaagtcagtggaatggttcaccaaggcctcagcaaaggcacagagtcaaggctaggaaaaaacaaaaaacagcaaaattccaataccgtaggagaagccattggcagtgtttataaaatcagtaaaatacgagtgaggccaagggattaaaaagcaactgtgagaaaaattattagaagtcatgaaaaacaatctgatatcactttttaaagttgagctcattgtgggtcaaatcagaacccacagagacaaaagaggtcatgtcccccgattataaccatttaaggaactagtacagaatattttaatccaatggatggtaccgttctttgtacaataagttttcaatttggacttaatgaagacaacataactgtcacatagtaagcactaggattgggcacgttctcttccaaatgctttatatgtatatcctccaataagcacaacaatcttaggagaagtacagtgctactcttatttctattttacagttgaaggccttgagacttagacagattaagtaactggtcagaggtcacactggaggttggtggaagaatcgagacttgaactcctggccctctgaccttgcttctgcccccagagtgggggtcatgggcagagcccctacaactcttgacatcacatccctatgccttcatcacatagtcttggcttttaaagaacacttgatcaaagcaaagaggagatacactattcataaattatttttattgtctgatcactggcatattctatcttaaataaaaccttcattcttaaattaatttcacaggtaatttacgtggttacctatactcctgagaatcagtgggatagagaataggtagtcctaccatagcattaagtaagtaaaattaacataaaatagaattaattcaaaattcagaataagagtacagtagccacctcatctcaacattcataatcttgaacatataggagctagattattgtgtatcataaagaggaataggtatatagaagattttactccataggttacattatacaattatactcgcattgatgcaactttttacaaaccataaacattttaaataactgacaactcaagccagatagcctaatcagcatagaacactcagaaatttctaagtgatcttattttctaatgagtgtcaattgtaggttacagatgacaaccagatgggatcaaccacaggaaccagggtgagaagttgagatcaatgaatggtatgaagaatcccctggttgagcacttggtttaaagataagatgttctcagaagagatcacagacagagatgtatcctcagtgttcagcacagttcatatgaaagtggattccagcaaagagaccaaagaatgtgtccaagggcttcggtcaaagtctgttctgtatgaaccttgctactgaatcaggcacatgtcctactgtgatccgaggagggtaacctgctggccatgcagatcttctgaggtgggcatagcacagggcagagccgggatgtacctcacatctcccctgaggtgggagcagagagactaggcttccctagctaaagtcttctaggatccacataagaagatccccatttatgatctcttaaagacccttgtgtggtgagagaatggtctctgccaaagtatatgcaaataatacaaatggtggtccctcaagtgagccagttcctcctgcccagggtcttgcactcagtgatgttcccttgcttggtctgctccacattccccatctgccttcttatgtcctgctctagcgtaagaataatatctccctagggttattatgaggaattaactgctcagtacattaggaggttcttgatgcattaagcactccatattattaactattattattaaatatgaattttttaccagatgctatttcaatgcttccccaaattagacttcctggacctttctatctggattgattacccaattccatcttgcctcctcactggccactgttgtaactttgtgttatattgtgatgtgatccctctaaactgtccaattgtccctccaaccagacagaggttaatcacgaggggaggggatgtgttattagggcccaacacagtgccttgcacatagtaggcactcaataagcattcagtgaaggagttaataatttgaaggcctctctttctcctttaagaattcaggtttttctttgtctgttgtggaaataagctttaaaaaagcagaggtgagtttttatgtaactctctggtctgaaaaagcacactgccacagtatgcttaacagcttgatttattttgtacctcaagaaaaatgatcagtaacattgaattgaatagatacataatgcagtctcaaggacatccctgaatagttttcaaagtaatcaatgatattgctgtgaaaatgttgcccaaatgaagagttcttgtccaatgaatctgtgaagtaatagacagataattttctttgtgaatacttttgtggccaaagaacgcattatgtgaggcagcagtaaaaacttttctcagtaggtgagaatgttccaaatttgtttcctagcaacaggttcttcaaaggagctgaagggtacacaatttcagaagaattttcagtggactttttttttgtttggaagggcaaggggtgggaggaaatgtgtgtcaggttgtgatcagaacagtgttccagttagtgccacatgtgagatcttgttgggtcaaactatagaataataactaacaactaataataataacttcttccagttagtgacacatgtgagatcttgtcgggtcaaactatagaatccatctaagaaattcagtccaataaaaatgtatcaacctcttacctgtataaagaggaattatctgtattatttatgggcccagaaatttaataatttaacaatttgtcaatccatgagccccactcctaaccaccttcacagatagtaaatgaggaattaggtggcttgctaaaacacgtagagattttttaataaggatgttgattggagatattgagtagttggaggaatgaaaattggagaaaagcaatctggatgaggaatttgggacaaggatatagctttgactgtcacaaatggagacatcttacccaagcaaaacctccatagctaccttcccagctcccatttcatggatttatcatatgttcttaatttggttttacaacttggccttctgatagtaataataacagcagtaacaacaccaggtggaattggagagagtgctggagagaggaaatacaataagtctggttggctagttcaatggcttaagactttcatcattttcttgcttctggttcacgctgacattaggaggactttatctaactattttatatatattattttatttaacctttatggcaattctttgaaatagccactagtaatatttctatcaatctcagagcattgaaccaatttgcccaaatcacactattattaagaaatggtagagcttggaaaaacatcggtcactgaagtaactaatctgacctatccagatcagtgtgggtggtgtggaaagatctttctgtaggtctgaggacaccatgatttgagtgcttagtcttagagatgatctggaatcacttgaatctcagaatgcaaatagttcatatcaatcatagggactttcctgccatttcctattaaacctactacactaaaaagtacccctttcaatataaccacaataggtccaataaattatggatttggaagcaagctgaattgtctggtgggctgccacactgaacaaattgcctgcacaattggccttccaagcataggcacagtctaattgtccctccccttttaccaacatcttgaataaatagaaacttggcattggtttcaatccccctcctcgcatctcccacaaaagctttctatttcttggaaaagaaaactgtccatttatcctaataagtatgagttgagaaaaccataatctttaggagaagtttcatttaaaggaacaatgtgtcagaacttggccaacaagaacaaggtacaatgtcagtgtgaaccagaagcaagagaatgatgagcgtctaagccactgaatgagccagccagacttaccatgttttctgtctccaagattggacctgggagacaaagtgagcatcaagtagtcttgaaattctaggatactaaggagcagggagctgagcatgtgatgagatacagcagctagcatgaatgttttttctttctgggctacagcctcctgtatccccaagaaaagtctcccaataaatatatattcatctgtaggctaggcttctctctcttttttttttcaatcagtggcttcaaacgtgactcctttttcattttgaattgattactgtacaattttttaacattctttttttctttctttgtttcagaggctactctttaaagacaggcattttacttgcagcaaaatgtaagtacatttcctccttgaaatggtatctacttctcagctgtaattcctaaagcctcctaatctttaaggctcccatctcacattgctgcatttttaaagtctagctcagcacacacagccaatctaacatttcatactattgatttgtataacatcatggaacatttcagaaaccaatttggaagcagattgaacttaattgtggttgtgacaatattacgtctaaaggtagataaaagtgaggagtaaaaaaataggcaatattcatttatatattatgaccatgtgacactaaacatttaaatattcagttctctcaaatgactaatttattattcttttcccagttgctcctcaccgtgtggtcacagactgtttcttgtttaacggcatggtggtaaccttaataattccttcctgtgtgtactgcgttatggccactctgtaaacccgtattctctccagaactaatctcctgtgtattatgtttctttattcttagtacttccagtgtctatacccaaattacaaatcccctctattctgaaagaccaaagaaaattttagcagatctgaactgggagttctgagttttgtctttggaattagggtgattttttttttcttttttaatgaaatgaaggtaagaataattttaacaaaggaaaaaaagaaagtttcatatgtctctggtgtaatttaataatatccaatttacaaaagcaggaggtagatttagctttagtataaagaccctagctgttcaaaagtagctcaaaatgtagtaagttgcttgtcactaagcaagtaatcaacaactataaggtagatggttgagtcatgtaccctcatggaggatacatcaacttctaattcatgtagaatttccagcagagaatacatctcagtagtcactgaagcatttaattagacattctagtacctatcagaatccaaagagtacagttgaattatatatattatacatgttctaataaattctcttttgaatcattcagttcctgagaagattatgtgttcagctgaactgcaggagaaacttagtttttactgatttccctaggggttggttttttgtttgctctctagaataaattgatcccactgctgtacatcaaatactcaagcgttagcacaaaagacattcaccctcaaaacattcagatttaatgtcaacgtattacgcattcactgatattttttaaaatgtcagtctctgtattatcttgctttagtctttattgcattatcaagacacctgcatgctatgaatgttttaagcagcttttaccaagaaagtcacgttagattttatgagtagtctccttttcgtgtgctgtcatgagtatattgtttgtacaaatgttaacttttgactgtattatttcttttgaacacagaaagctgttcaggggaaattgcctatgtttactttcttgcatattcatatttggtagctctttaccatactgttactgcctatttaggtttactagtattttaaatcagttaatgttaaataccgaaagatacttggtatatattaatcgtgaaaatttgatgaagggcaatttaaggccgcattttaagtcactatatgtaaatttaaacacccacgtgttaccgcaggatctctttatcaaaatttcagttgaaagcacccgttacctttcagattgcaaaaaaaaaaaaaaaaaaaaaaaaaaaggggggttggggggtggctattttactttagaggtctcagtttgtgactgtttgttttcttttcacattttttttttctcagacacatacagggtgcttagtgacctatttcattagtaaacattttgagaaggaagcttgcactgggattataaacaatccagacaaaatgggtctacccagctccccaagcaatctctgagcaaccggggaaaggttggtctgacccatggagtcacggaaacatattaaaatcaccaggcaatcttgacctgggttctttttggcagctacattgaaccagcccctctggagttgactttttgtcctaatgatgattgtattattcaaccaatacaaatggaaaacgacctaatcaacgttccattcagacaagacttagatctatagtgaatgacaggagactttccaagtaaaggtcctggaaatgtatatgcaacacataaaatcccaacccacggatggaggacagctttagccaagtcaggaaaatatgcctccatagaggaataaggctgggcgatggaaggaactcaggagcaaaaatcaaaaggctaatggctaagtcccagttcactccttcagtagtataatttggagtatgttacttaacccttcggtttcaaagtatctttttggggaaggagagaggaaggaagacattttctcctgaccccttcaaagggttgttgtgataatcacatgatataatgttttggaaaaattttaccatctgaaaatgctttgtattaccaataatcttattaaattattggagaccctccctgttttagtgggagtccttgggattctggtggcaagctttgggccttcaaattaatgctacacaatagaagaaaatagaacactactgggccaggtcactgctctggaaagacttgcacccacattctttcttttcttttcaaccgctcatattctttaggaccactgcctctggtggaagagaattatcttctgggtggtatgggtgagaaagttgccaaagaaacctgaattatctagaggcctgtaaaatgcgcaattgctttttaagaggcttggtgatatcgtgtgttcctttcgatttttggcaggaaccattttctgcaatttgtggttttgcaatttctcttttcacagacaacaccctggctctcattcaatgccccattggtgggggtgaggtggggaaaaagaaagattccctggggccctgactgctccagaaaaagaaggaaatgttaatgaaataagtcagaaaagaacgctagagactagtggaagctggttggttttgggggaagaaacaacttttaataaattgcatggtgtggctaggattttagctgaggctttcattgtctgggcaaagacctgttctcttaattcttcttgcctctccactgagctttgtttgggttacaatgtcaatcttttttcttcattttttttcctgtattcaacaagcctagagcagtctctttcactggttccttggcctcttctagagggattttctttaagtattccatctctaagtatccatttgccaattacattaacttggtttgtgtaatttagctcaagatctatgcatcagaactttttgccctcattctgggtgccttttcttccccttccctatggctttaatgccctttgcagaggaggtctatggccagcaaagcagtacagggatgtagcatttatgtaggcaagagtgatttgttctgtttctattcatcgcctctggaaagggtttgcagacttttgtttgcttttttatggctgctaggcactgtgctgaaggatttaaagttgcatccagtgttaaccttgtattctttctctgttcacttttttatatcaaaacagtcctctgtttccaaaggagtggattcccagggcctatgcccatcgttcttgggctttccatgcacaaaggccacgtatttcttctcttgtcatgacctaaatgtcactgcttcttgtacttctaaaaggacaataaaggtaattgctactcatatgttaattacaatcccccaaatttcacgtatttcgggaaaatatgattttactgtgtgtgtgttgtaaacatttagggaattacttctgttatggaatcataaatcatggaactttaattttggaagatgctttcaatatgatgcagttcaacagcccacccctagctgtcctcacaacatcttctctcgaagcccttcctctatctcatatggtagcctaatccgttttttaatagctcagtattcaaactttctttcgctaacctgagataacctccctctgactttgggtcatttgtgctagtttatcccttctggagcagctcagaagaagctgactccttccccacatgacaaccctccaaatattttggaatctgatcccgtatactctctgagtcttccttgtccaggctaaacatcctcaatttcttcagccattcttcacacgacttggtttagttatccttttccatttatccaagttgcatttttcaatgctccttttaaaatgttacagcctgaactgaaaagaatactgctgagatggctgaccagtacagagcttctagaaaaaaacaaaaacaaaaagaaattctcgttctggtgtgttagttttattacaataactaagagcacatcaaaaattttaatagcactttagtcctgaggctaatctaaaacccctagatacaaaagctgctactaaaacagatttttcagtcatgtatctttgcacttggttttgaatatgatgcaaaatatatttatccatgcaacacgtagtaatttcagaatataagtaaaactattaggagttttttgaatttaaattattttaaatcctttgtcagtttgatctgcctcttggcttcattcaagagattggtagagacagtgaatatctggattttaagctcctcaaaggtggaaccatgttttattcatctttgtctctcctgaaatgtctgtgatattctcttaaacaaccagatgctcagtaaatgcttacattaactcaatcaacagaatcaaatacaaagtagctttccaacacccagactgggacctatctttaggctgatatctgtgccctgtagaaactaagataaatacttaaaatacattatactgctaatgcttggcaattttgtagcattgtagagttaattaataatgccacctcaagggctagatagtctgaattctaatcttgctagactttactggttatgtgctttagagcaaattagattaccttgtctgttcctgacaaataaaatatagtaataaattatttgtatctgcgtcataaggtgtttgtgaggcatgtaaatgcaagctcaaattacatgtaaagaatatagaaaaaattctggtaatataaaaataataatagtagtaatagttgtattgttgttgcttttgttattattttcaatatatgctaatagagccacccaatcctaagagaaacaaaaaacaactttgatagaacttgttcatattaaacccatattgacttcaactaataattttattatcaaaatgctagtgtgatctgaatataaccgactgcttcatgggccatttaagctcagacatgcattcgaaaatggaaaatcaaaacatctaaaaagatgacaacaatgtacatttttgctgaagtccttcaaaggggaattatgttacattccacagcaaaatattctaaagatcttcttaacccaaatttctcattttgagtaacaactcaaacattttacctttctgtctgtgctttataaaaacaaaatgtgctgttttgttcttgtttttttctcacttacctcttctctcctaatcatgtccagttctccagaactactaaattactagcctaatcttttctgtctacaactcctccattccctatataattttatgtggcccttccaggtggcatgtgaaaagatgtgtatgtttgcctgtgtgtacgtgtgtgtacattatatattatatacctaatatataaaatatattatgactttcactgataaaatagatgtgtaacaaaatttatgattgatgaatgaatatagtttccatgtaaatgtggttgatatttatatatatgttaatgagtaagacaaaaatgaaacagaaaaggtatacctcacaggtccactcttcatcaataaatgtgaacaacttctttgcttaactggataagagttttgaatacagttgaatatttcctcaaatttccatgttactcacaatatgacagctatagacagaacattcctttttgtttaatctgcatcattaacattctcatcactttcttaaacgtagacaatcaacaaaacaataaatcaagacctggttggtagcatttgccaatttctgtggtgtaaatgctgctgccatggccattttcaagttaccaacatgatgtcactaaatgtgtaattaggaagatgtgcagtaacacacctttatatggtattcacaccatacggatacaaagcattcaaataaactaaaaagcataggtaatttaaaatgcagcaaaataattaagaagtgatgagtttttagcatttatttcctttggggtttttttttttagcttttattttaggttaacaggtacatgtgcaggtttgttatataggtaaaattatgttacaggaatttgttgtacagattattttatcacccaggtactaagactagtacccaatagttattttttctgatccttttcttcctcccaccctccaccctcaagtaggtcccggtgtctgttgttcccctctttgtgtccataagttctcatcatttagctgctactaataagtgagaacatgcagtatttggttttctgttcctgcattagtctgctaaggataataatcttcagctccatccatgttcccacaaaagacatcatctcattcttttttatggctgcatagtattccatggtatatatgtaccacattttctttatccaatctgtcattcatgggcatttaggttgattccatataattactattgtgacaggtgttgcaatgaacattcacatacatgtgtctttatggtagactgatttacattcctctgggtatgtacccagtattgggattgctgcgttgaatggtagtcctgtttttagctccttgaggaatcaccacactgctttccataatggttgaattaatttacagtcccaccaagagtgtctaagtgttccctcttctctgcaaccttgccaggatctgttatttttttactttttattaacagccattctgactggtatgagatggtatctcacagtggttttcatttgcatttctctaatgttcggtgatatttgactttttttcatatgcctgtcagccacatgtatgtcttcttttgcagtgtctgttcatgtccattgcccactttttaatgtttgttgttgttgttgtttcttataaacttgtttaagttccttacagatgctggatattagacctttgcgagatgcataggtggcaaatattttctcccatgctgtagattgtctgtttattctgttcatagtttcttttgctgtgcagaagcttttacatttgattagatcccatttgtcaacttttgcttgcgttgcaattacttttggcatcttcatcaggccatttttgtccattcctatgtccacaatggtattgcctaggttgtcttccagagtttttatagttttgggttttacatttaattctttaatctatctttagttgatttttgtacatggtgtaaggaaagggtcccgtttcaatcttctgcatatggctagcctgttaccccagcaccatttcttgaaaagggagtcctttcctcactgacggtttttgtcagctttgtcaaagatcagatggttgtaggtgtgcagccttatttctaggctccttattctgttccattggcctatgtgtctatttttgtgccagtaccatgctattttggttaccgcagccctgtattatagtttgaagttggctaaggtgatgactccagctttgttctttctgcttaggattgctgtagctattcagactcttttttggttccatatgaattttgaaatcattttttctaattctgtgaaaaatgtctttggtagttggataaaaatagcactgaatctgcaaatcactttaggcagtatggccattttaatcatattgattcttcctatccatgatccatgagcatggaatgtttttccatttatttgtgtcatctctgatttctttttcttttcttttcttttctttctttctttcttttttttgagatggagtctcactctgtcacccaggctggagtgcagtggcatgatcttggctcactgcaacctctgcctcccaggttcaagcgattcttctgccccagcctcctgagtagctgggactacaggcatgtgcgaccacccccggctacttttttgtatttttagtagagacgtggtttcaccatgttagccaggatggtctcgaactcctgacctcatgatctgcctgcctcggcctcctaaagtactgggattacaggagtgagccaccgcgcctggccctgatttctttgaacaatgctttgtagttctcattgtagatatctttcacctccctagttagctgtattcctagatattttattcttttcgtggcaattgtgaatgggattgcattcctgatttgaatcttggcttgtctgttgttggtgtataggaatactagtggtttttgaacataattttgtatcctgaaactttgccgaagttgtttattagctgaaggagtttttaggccaagactatggggttttctagatacggaatcaggtggtctgcaaacaagggtagtttgacttcctctcctcctatttggatgccctttatttctttctgttgcctgattgctctggccaggacttccaatactattaggttggtgcaaaagtaactgtggcttttacatttactataatggcaaaaactgcaattacttttgcaccaacctaatacattgactatgaggagtgagagagggcatccttgacttgtgccagttttcaagggaaatgcttccagcttttgccctttaagtatgatgttctctgtgggtttgtcatggatggctcttactattttgagctatgttccttcactgagagttttcaacatgaactgatgttgaattttattgaaagccatttctgcatctattgagataatcatgttgtttttgtctttagttctgtttatgtgatgaataccatttattaatttacatatgtcgagccaaccttgcataccagggatgaagcctacttgattgttgtgggttagctttttaatatgctgctggatttggtttgcaagtattctattaaggacgtttgcatcaatgttcataaaggatattggcctgaagtttttgttgttgttgtgtctctaccaagttttagtatcaggatgatgctggcctcatagaatgaggtggggaagaattagttccctcttcaatttttggaacagtttcagtaggaattgtaccagctctaaacacccacatcttttacatctctttgtacatctggtagaattctgctgtgaattcatctagtcctgccctttctttaatcggtaggctatttattactgattcaattttggagctcattattggtctgttcagggaatcaatttcttcctggttcagtcttgggagggtgtatatgtcaggaatttatccatctcttctaggttttctagtttctgtgcatacaggtattcatggtagtttccgatagttatttttatttctctggggtcagtggtaacatcctctttgtcatttctaattgtgtttatttggatcttctctcttttcttcttcattagtctagctagtagcttatatatcattaatttttataacaaaccaactcctggatcttttggaatggtttttttttgtgtctcaatttctttcagttcagctctgattttggttatttcttgtcttctgctagctttggtgttggctttctcttgcttctctaattcgttctgttgtgatgttaggttgttaatttgaaatctttctaactttttgatgtgggagtttagtgctataaatttcccactgaaggctgattgaactgtgtcccagagattctggtatgttttatcattgttctcattagtttcaaagaacttcttggtatctgccttaatttcattacttacccaaaagtcatacaggagcatgttgtttaatttccatgtaattgcatgactttgagcaatttttgtagtcttgacttctatttttactgtgctgtggtccaagagtatgtttgatatgatttcagttcttttgcatatgctcattgttttatgtctaattgtgtggtcgattttaaagtatgtgccatgtggtaatgaggagaatgtatattctgttgttggggacagagttctgttgaggtctatcagatccatttggtccaatgttgagttcaggtcctgaacatttttgtcaattttctgcctcaatgatctgtcctcaaaaatactgtcagtggagtgttggagtttcccactattattgtgtgcgaatctaagtctctttgtagactaagtctctaagaacttgctttacgaatcaaggtgctcctgtgttgagtatatatatatttaggatagttagaccttcttattgaattgaaccctttactattatgtaatgcccttctttgtcctttgtgatctttgttggtttaaagtctgttttgtctgaaattagggtagcaacccctgcttttttactaatttccatatgcttggcagatttcctccatccctttattttgagcctatgggtgtcattatatgtgagatgggtctcatgaagacagcataccatgagtcccttgtatttaatgcaagttgtttaactgtaagtttgaataatttaatttgtaacaattattgtgtttaacgaatagcttacaaattcttgaaaatctgacaattgctccccggcaaactggtacaaatctagcataacactggtccttcctctttagagagcagtgagggtaggaagtgggaagaagagattgggatacgattgtgaatattaagttgattttttttctcaagttacaatttttaaaaaatctgttttagacttttgccaagatcagagacaatctcctaagtcttcagcaggcagtttctaccatccttgccatgaaaatgttttcatctttagtattgattatgattcaaagatttcatcattctatcttttctaaataattttttagactacaagaatcacaagttaaagagaatggggaggagaggattgtaagatatagatatttaatgaaatccacaaatagaaaaaaatgtttagttgcatcatattaatctgaactgcagagctccataagaaatggagagaggttggttaatggctacaaaaatacagttagatagaagggaaaagatctagtgttcaatagtgaagtagagaaaggtagttcacaataatatggtgcaatagttcaacatagccataagctaacaattgaagtgttcccaacacaaaggacaaatgtttgagatgatggatatcccagttaccctgatgtgatcattacaacattgtatgcatgtatcaaaatatcactttcactccataaatgtgtgcaactttttaaatgtatccactttttaaaagctaaaatacatattttttaaaaggaatcagagctgctctcttctctctggggcctcatggtatcacctacctctgttgaccaggccaatctatttactctccagattgcatatgtcccaaaatggcagctacaggcatcaaggattagacattttcgctcctctttccacttgggaaacccacaaggatttctaaactccgaagaaaaaaaattcacatggttcaagtcttttttctttggcaggctactggtcagcatacaaatggggttcctcagattgaaacacttctggttccattagatgtgactctagcagagttgtgggaagggatagggtcagaggaacatccaggactatgggcaaggacagcttacacattcgggagctgtgaatagaaaaacataatgattgacatttttagcatagtattcataggctttttcattaaaaagaagaagcattatgaaatatttcaaacatagaggaaaataatataatgagtaactatgttttgtcatgcacatttaactaatttgagtacatcaatttttggttcagatttttatagattttaaagaaataaattactttaaatataattaagtcttcatatgccccctttcctggtctgattctgctctatcattctcccacaaaaaaatcacaatcctgtatgcttatccttgtttttctctatcagtgagcaatatccgtcattgcttcataatttttaagttttcataaatgataccaagccatatgtgccattctgtattttttgtcagtcaacattatgtttttgagatttatccaactgaacatgtgggtatgatttgctattttatctctaggtagtattccattgcatgaatatattgctattttcattcattcattcattctattggtgaaaaattaggttgttgccaatttttgctataaaaaaatactgcaatgattatccttgtagcctcatgtacctgggcagaattttctccaggataccaagatgtaaacttattggattataaggtatatatctcattaatattaccagataatgccaaattaccctcctagggttgaccagtttacattcctatgagcaggtcatgtaagtttcggtttctccaaatctttgccaacatgggttattttcagacctcaaaatttttcttcaatatgatgggagtaaaatggtgtgtcatttttccagttttcaattcccaaatttctagtgaaattgagcatcttttaatatgtttcttggtcatatttttgtgaattgcttattcacatattttactattttttaatgagttactattttatttttatggttttgtataagtgaattatctcttccatttagtaatctattgtatgttatatgcaaatacattttccaactctgtttttggcctgttttttttaactttttgtagaataattttaattatagagacattgacattctaacataatctatatttttaagattttcatttaagactttttaatttcctactttgatgatgtaaagatatgcttctgtacactgttatgtaagttttaaagttttgatttcacatttgtgttttttatctatatgaaagttacattttctggaggctgaggcaggaggatcacttgagcctaagagttcaagtctgcagtgagctatgattgtgccactgcactccagcttgaccaacagagtgagaccctgttctaaaacaaacaaacaaacaaataaaacaacaaaaaaaagaaagttacattttgtatgctgtgaagtagggggtctaactttatatttttcttgcagaaaatcaactcatccagcatgatgtaacaaataaatagtccatgatttccccatggaattgctatgctatctctatcatgaacttgctttccatatgtctggatctttttctgagggatctactctgttcaaatagtctattgatcattgtctgacccaaaggcacattctcttaaaatactgtagcattaaattacagcaatctccccttatccatgaggagtaagttgcaagacccctagtggatggttgaaactgcaaaaagtaccaaaacccatactatatatactatgtcttttcctatgcgagtgtacctatgataaagtttaatttaaaacttaggtacagtaagagattaataacaatagtaaaatagaacaattaaaacaatatgccactatcactagtcttctgctttggggccattattaagtaaaataaggattacttataaacataagcactgcaataccatggatactcagacaatgaatttcataaccaagatggctattaagtgattaaggggcaggtagcatattcagtgtggatatgctggacagagagaggattcatgccaggctgggacaaagtgggatggtgtgagacttcatcaccgtactcagaatggtgtaccatttaaaatgaacagttatttatttctggaatttttcacttaatactcttggtatactgtttgaccgctgttaacttaaaccacagaaaatgaaactgtgagtaaggtagggctgctgtaatttttcatagctgataggacaagattctgtacctagatctttttcttcactattacctatatcttctctgtcttttaatttcttgtgtgacttttaagattggtctgtcaatttccacaaaaatctctataagaattttgatgaaattatatagaatttatattcaggagaattggcatctttgttatactgtactattccgtccatgggtataacatattgtataatatacttaatcttttataaactttaaaaatgttttatagtattctctacaaaactctgaaacatcttttgatatatttattagtataggtttttatgtgaatgatctttattctatacttttaaaaatagttattttgctatctaggaatacaattgattttcatgtttgatttttaatgcagcaacactactaatctctctaatttttaatgtatctgtagattattcaaagattgtctacaatcatatactctacaaataagaataattttgtatcatgctttctaaaattctttgagcctctgattttgttggttttattgcattgccttgggtctttaattcatgttgaataccaggataatgacagccattcttgacttgtctcggactttagtaagaatttatttaaaatttcacagttaggaataatgtgtgctgtatgttttttgttaaatgacttctattaggttaagaaaaagtcttctcattccttgtttactaggatttttttaaaaaaacatgattgtgtatttaattttatcaaatctttttctgcctctatggagatgatgctatgattttgttctgtgttcctttcatgtgaaatattcatagattttctgacgttaaactattattgcattcttggcataaactctacttggtaatgcttttttaaaatgtattgctatacaatttgcaaatgttccattcaatttttctcatttatgttcacttgtaagaatagtctataattttcttttgttgttgtggttgtcattatgttcttttttacacttatttagcattgaatttctttgtgctttgggaattttatgaatatcttactttctttgagactttcctctctttctcttcctccctccatctcactctccttagccctccttatctaaagattttgctgttgcctctactgagggcctcacccaagactgccagtccaacaatacctttaataggggattatgctcctgctccatggtgatattgggaatatccaagagccaagcctccaagctagtgatagtttggctcagttgctgcctgtaaggtgaagccagtgtttccagccttcctgggccacaactcaatagtcccaaggacagcgaactttttctgcctcctttgagaaactgagaagacctacattaactcctggtttcaagtagtaagcccatcttcagatacctacttaatatgaagcatttttactttgtagtaaactacagttgctaaactcctagccctccctaattctagtccttcctagccctgattccagatggaagcccaggtggctaagggcttcaccttcacccccatcccatcccctgtttatctccttagttttcggtttaacttatgatctgtagaatgatgtatacacgcacacatacacacatacaggcatgcattttaaatctggaattaggtttaatctccaaatgaactaaggagtgtttcaagaatgttaggtttttaattaaaattagaaatctatgtaattatcatgttctgtagttctgggcctttgaagacatttttagttaaatgaaacttcattgtattggggtggagaagccagttagccctagtttagccacagaccctcaggaactatcaggggtggggagtggagggggtcactatgaaagcaggaaggtggagatagggtgctgtttggagagaagttctgagtggcatacatagaatgtggcatgtggcagaaaaggagtggtgactataaaatactgtgtaagtgatgagctttctttctctactcatatcttgtaaacttcaatacattaatttcaaaaatatgtatcaacatgtactatttgtcagacactgtgctaggtgaagtcaataaaaaaagacaagacaatgcctattcccttaaggagcttatattccagtggaaaaggtaaagtgaagatagggcagaatagctgtaagggaatatttcctcagtaagatttgacatagcattccctgtgtgctggtacccaaagtcacatgcctagaagacaggactaggttccatgactcaaagtgatcacatcatgaacttctcaatcttcaactctcagggtccagcagccaaaggagagaatgaaattactcagcttagaagggttttctcaataccaagatatgagaaatctgaatgagtgagtgatgttaccattcatctttatgttttttggatttttgtgcttgaaactatatgctgagtcatttcatgaatccaggcaggctgcatatagccagcaggtaaggaatgagcattgctggttccagacaacctcagcagagcagttagagctgtacttactaagagtaccagcagggtatagagcgtaaagagaccaagcttcctagaattcccattgtggctctctgaagcttgtcccaatttgctcctcagtaaaatagagaatttaagccaccgctttgtgtttggaagggtttaatttagacaagtatcactcagatggccattttttttgttccattcaaatttcaacacatttccttagtctttgtaattaaggtttttctaatttcaacatatgtttcccaaaagaggctttcaataatattgaatatatgaaccatacattgcttacttgtctgtagccccttgaaatttgctccacattttttggatgtaactccaaaaaaccctatttttatttcaaattctttatattcagtagtctatttctgtaatagacaaatttaactgtgtgtcattctggaaaataaaaacagctaaatcatgtgagaaatgttatatgcctttccacacaatgatcctttaccaggcacaggaatcagtggaggatctgaacctgtggttcctcatgtaattgattccctgccctttataactctcataaagagcttgtcaggtagacagtgaatctagtatttagagggttttttcctttgtttgtttgttctaacatcatggcacctcaacagaagacaactactttatctggttctcaccagtgatccttcctgccacacttctgctggacttcttgaaagatggttctgtagtgtactttatgggtgatttaatgaaatttcactgctagttttgacaattgattatttttaccttacatgctaactttaaaccctaaatcccatatgaactgtgacttgatagcaattctaaaatttcatcagtaatattttaaagctgatagcaaacacttatagtaatactgttttatctggataaaaattcatttataacgttttaaagtagaaacattctagtcctctttaattatgtcattaaaatgaagaagaaacagaagtggaagctaggagacactatcaagggaaaagcacttttctgaggaaaccagagagtcctactttgacatttcaacacagaccttcaggagccctgctggtaattggtttttgtagctttgttatagcactaagtcatgttttatggactcttttaataggagagctttgttacaatgtattaaaaaagaagacaaagacaggtagcatcaatctaccaaaaggtcaaagagaaaaaagcagatggacctcttcccctgaatcaagttaaaatggtcctgcctatcagaagatagcatctctttatagacacatatatataatttttccagaaacaggcacctgcaatcaaagttcctcctttctatagttccacaccaccactgcctctaatcagatgagtcagtaggagttacaatgtgattccaaactgcaaccgaaatataacttgggatactcagaggtcttcttcctaatttgcttgtttggagcaagtctgactcattcacagtatcatgggcaatcacttcttggccttttggctatgatcaagtgtagtatcatgggcagcggcttagtgagggttgaaccgagaacttttatctgttcatctcctaagaaaataatctgctctattcccttctgtgaataaaaaagaaagaaaataatatgttcaaagatatcaagtccctaacagatacattataatattagccattgacccgcttttgtaactaaagttaatggctacagctcaggctatgcgtgttggacctatttggtttctagccttttcttagtattttctttacaaactccttgtgcaattttttttccctggtggagcacatgccttgaaggacttagcctactaagtaaatagttaattaacaataaatgttataatttttattaatcaaaactggaaattgccaatcagaactttgatttggctgatgtcatatgtgagttgttacaattccataaaaaaacaaagaaacttcacattttcaattagatttaaaaaaaaaacgcaggccatttcctttgatatatgtaatacataactaataattatgatgtaatctggtacgtgaatgttaaagggtagacatacatgttgtaggggagtttctattcagagaaactgaaaaagcattataaaattcccagttacatcttcccttttatgtacaagcttcaagcatcaattacttatcccagagttctgtttaatttttctttaccagaaaacacagttaactagcttatgtcaaaagaacatcaagctgaagttaaagatctgttgctttcaacatgtagaatggtttccttcttaaatctgtgcttattactagaatcctatctatcattttttcattttccattcatttttataaaataacaacaaaaatacaataagctactcagataattgacaaataaacgctgctttgcagaaaacattggcattgccgtgaaatctgattggcaagcagcaccacataaagaaaacttgaaatggttctttgataagctaaggcacaagtctgaatttgacacaggaaaggaaatttagggatttaaatgtatagtatacaaaaatacaggtcatttgaaagttaaacttttaaaacttgagcaccacatgtattggaagtaagacacagacttttcacagatatttcaggccttgggctaacaaccctaggtaaaaacaaacaaacaaatcaacaaacaaaacgaagataaatacttcagagtgatgcaagtagctacatagtagaaatttattgttttgagcatttattaggtgccaggcattaaaatgagtattttataccagtgatttttcctaattacctgatttaatcctatcaataacaccacaaaataaggattacattttatagaagaaattgaaggtcaaagaggaatcattttgcccaagatcacatgtaactagaaaatggaagaactagaatcaaaatcaagtctgagaccaaaacccatgctttcttccacactgacttgcctccttcttaagattgtctattaaaactaaataaaattgttacatttccccagacttctaacttcaccttggtatgttttcttcaaagccccattctagaaaatttcttagacaatggttagcagggtcctgtttgttgcctatatcaaatgtataaaaagcaatattgttttaactactgttaattctggagaagacttggacagagcagtgtcttccaatcagacttgtctaaacaacatttgaatgcaacacattgtcatttcagaagaaaatgatgcaatttacttagtcgtcagcaaccatgaggtcttcaggaagacagattaaaagaagtaacattgctggagcctggccttttggtccattacatcattgactcttcaccataatcttttaggtagatatcatgattaccatcccacagatggtcttagagaagttaacaagatcaagttaacacactgggtacttgaacccagcctctgcccttagaggctcacctcatgatacagagtatgagaagccttggtgcatgcacctgcagagagaagaagaggtaatagacctcttctctggcagatgtgtgtccctctactaccaaatattgctgttgtctcatgttcccccaaagtttgttctgcttctcattcattagtatacacaatctcatagtttccatttattgtacaacagtctgtgccagttacttgactatgttcctaatgtatattatgtctggataaatatttgttgaatgaatataagactttatacatcatttaatgatcagaacaatattatgaggcttacattactattttcacataggtggaaggcagaggtgaatcgaggccatgcagtgtgagtagaggatctggaatttaagcatctaccagaccccaaagcctatcctctgcccaggaatgactctacgcagagattactcttaatggagattttgcttctaggctctgagaattagattttattacatttggtttggaaatctatttaacacttgtcatggtttccccagaagcagatcctaggggaaggatgaaagtacatgtggtttattaggaggtgatcccaggaaacatgagtaagagagtagggaagtgagtgacaaaagggaagacagccaaaaaggtccattatccaacaaattcacattgtgagcaaccaaacttaatccggctggagtgactaggaccaattgcacaggggaggtggtgaggagaacactgtcatgtggaaacagcttagaatagcgctgaaaaattccaggtcacctacagtttggttagaacagctcggggtatcattcagcaagtaatttacctatagtgaagatcatcctaacctttgaaattttcctaagagaatgttgttgaaagacataaaagaaactctgaagtatgcctgcaatcccagcactttgggaggccgaggtgggcagatcacctgaggtcaggagttcgagaccagcctggcaacatggtgaaacttcatctctactaaaagcacaaaaaatagccgggcatggtggcaggtgcctgtaatcccagatacttgggaggctgaagcaggagaatcgcttgaacttgggaggcagagattgcagtaagccaagatcgccccactgtgctccagcctggatgacagagcaagactctgtctcaaaaaaataaaaaaaaaaaagtcaaattaatttctcatctgcaaattcaaaggaaatctaataaaaatcccaacaggattattcataggacttgataaactcatttgaaactccatatggaagaacaaaagtcccagaatagccaagacaatttaaaaaataaaataaaggttaggcaaactttctatgaatagacagctagacttaccaagttgcagccattaaggtagtatgtattgtcccagggatgctggactaggatagagatctcagacatggacccatagagggccctggtaaacaaaagtggaggtcatgagacatcagtggggaatggtagattgttcagtgctgtggatctgttggttttttgtaaggaggtaaattaggagaggattttactttttcccatatagaaagccaactgccccacctcactgatggagatgtagtcactggggcagtttccagggcttctggattttctgctgcaccattgttagcattatttccaaggaaaaaacaaacttctgtggaatggtgttactgtacacatttatacagtggttgaaacaaaggtaaagacgttggagccccacttgcttagcttccccttgatacacccacccccagcatatccataggaacagaggcccattttctcattaaaaaatggagcagaaaagacaacaataacccaaggatactcccttctgtatttcctttggaaacttggagtccaaaaaacccagttttactcttcatttagaatccagtgttgagatacacctatttaaaacattccatggaccctcctctcgtatattttgtccacttcaaaatgcatggcaagtaaggcttcatcttacatgagcactacaatccactgcaacagtggttcaaatgatcctaaagccacagcgcagctattgaaaaagaagggcagagtcatgtctgccataggcacactaggggaaggtgatggcatacttgccaagaatttatccttctttaactgacatgttcctatccaaaaataaaaacatgattattacatcattaacccagggagcttgatattaatattgaaaatagtaaatcactatcaatttctgcacacagagtattttttcttaaagcatctatgccacacaaactagatctatacatcatatcacagctcttcttaagtgatgggaaaagggtaccctcaagagttaattgccttgagcaagccaacagttgattaggaaatatggtgttcagcccaaggtttcccttctcagtacaatagaccattatgtatgaccattttttaaaatggtataactatcattgattatcatctgaagctttattactttttaacaatttggacaatttttcccatgcaggaaagttggaggacaagctaaacccatcacatcattttatttattgagtgtatttatacttcaactctttccagaaacaagttgaaactgcttaccacagagccagatataatctcgttaacagcaaaataaagattggtaattttttttttcccaaagaaagctaaattgtatttagtcagtatttctttaactggtttcctttaacatgagagctatgcatagctttgcaatggcataaaataatgtttcagctgtcacatagaaaaagtgcttctgaaggctgaccacagtggctcatgcctataaacccagcactttgggaggccaaggtgggcagatcatttgagtccaggagttcgagaccagcctgaccaacatggtgaaacctctgtctccactaaaaatacaaaacattagccaggcatggtggcacatgcctgtcatcccagctactagagaggctgagggatgagaatcacttgaactcaggagtcagaggttgcagtgagctgagatcacaccactgcactccagcctgggcaatagagtgagactctgacaacacaatatctgacccaaagagtaaagtaataaatgaaatcttattaaagtgcatgcaattggttttcttaaaaatgaagcctctgtttggggcaggtttttttctaaataagccaacatttgacttaattgcacatagatcaggagagacttttgtgaagcagctagcagagtatgtgaatctctccctactcaaaaggtttgtccccattgtccaaggttccagattaggcatccacctcagaactgcacagtgtttatttttacttacttgttttgatggtaacaaccaagcatttgacctcatctcatttgttttgattcccactccaggtgaaatttgaaagctaacatggaaatgcatgttctatcaggagagttaaaagaagagaaaaaaagttaccaatactcctagcctctgtaaaaagagatctctgagaccctacaaaagaatcctaaatttgaaaagctattcaagaatgtattcatccactcattcatccttctatctatttagtaaatgcttactgcatgcctactctccttaggatatggagaaggatgaattgcagagatatctgttagaatataaactccctagaaggtgccaagctggctcaaggcaattaactgtcagatatttatttgtgaattacagactctggcttaaccacggaataatggaggatcataagctagcttccatttgctattcagagcctttgtgagttgattatatctgctcagagaatgcaaattcctttataaatctaaggttgtgactactgaaagtaactttcatcatgtatttccacttcttcattctatagctgaagaaacagaagacctggaggtaataaagtgatttgttcaagttacacagctaaccaatgatggaaccaagactagaattcttggtaatatgctcttttcactacagagaaaatgagggcataaaatctgcaacataattatttaaatgtatttctagtccagttgcatttatttgtttgcttgtttggtttcctcctacttcttacaagtttcttcttttaaattttaaatacttacagtgtaatatgataaaaataataattgatggaccaggtatggtggctcacacatgtaatcctaccactcttgggagtcccatgagggaggatcacttgaggtcaagagtttgagactagactgggcaacgtagtgagacaccatctccacaagtaattttttaaaattagctgggcagggtggtgcatgcctgtagtcctggctactaaggagagtgaggtggggggattgcagtataataagataattgaaatacttacagtataataagataaaaatacttacagtataataagataaaaataataattgatggaccaggtatggtggctcacacgtgtaatcccaccactcttggagccccacgagggaggatcacttgaggccaagagtttgagactagactgggcaacatagtgagaccccatctctacaagtaatttttaaaaattagctgggtagggtggtgcatgcctgtagtcctggctactcacgagggtgaggtggggggattgctttagcccagaagtttgaggctgttagtgagctatgtttgtgtcactgcatccaacctgggtgacagagcgagaccttgtcttcaaataataataataattgatgtaatctagagtgagaaagaagagtgaggaaaatcaagtgaagcaataggtagctttagtaaactaaatgcactgaaaaagttctacacagttgctaaaaatgggctaccaattaatgctgtacttcctagcagcagagaaaggaagaaaacataaattttggttggcatcaaatcaaaagagtctagactctcagaagaaatacaactgctctcaccctaaagcctctatgaaatttctccattagggcctcagaaaagacattgcttctattaattcagcagtgaattctgacaggttgtttcctgagccattctgaaggccagtgggtgtacaatgcccaggacaatgaaaacatctggacaagaagccaggccgggcgcaatggttcacacccataatcccagcactttgggaggccaaggcaaacagatcatttgaggtcaggagtttgagaccaacctggccaatatggtgaaaccccatctctactaaacatacaaaaattagcagggcatggtggcatgcacctatatcccggctatttaggaggccaaggcacgagagaatcacttgaacctgggaggcagagattgcagtgagccgagatcaccccgctgcactccagtctggacgacagagtaagatcttgtctcaaaaaaataaaaataaaaaggccagaacattatgagtccaggtgtacagctcactgaggtcccagctttattcagggctatccgggataacacttacaccacctagagcaataataaaggatttgctttgattggactattggagtgtgcccagacattgtattttgggtatttacatatgtatcttcatatcttctgtgtaagccctatttattatctctttaaactgagtttttaacaacgactgtgagatggaacattcaaggttataaaggtcatatattctgtcaagaatttggggaacaaatattcagtattgctgaaatttttctaatgctgaccccaatagccttttatgaaaattaatgttttaccagaacagaacatgcgtcagaaaatgcttagaggagcaaaggcaaataaaacaatccttcagcacactggatttctgaaccactgccccattctcaccattatcccaggtaattggtaatttatactattctggagcactgcaatgccaagagagtgagaagtgtgaatgtttttaccaattttaaagttataacaatgagatagtgctacatggccaacgggagcctaagtgtaaatgaaccactgtggttttatgcattgaaagttacaacaaagctgccctgttgacattgtctgagtgtacctttcattatctaagggtggttagttgtacttaccagattttgtgaatgactgtgcttcctttccatagccaggatgtcccagtatgtcctttcccttggttctagctccatatctgctttcctctggcatttccagcagtctaatttccctagcattcatgctgattctctgaaagaaacaagggtcctctttctgattcctttatagcagagattctcaacccctagtgcacatcagaatcaccagggaagctttgaaaaagccctccatccaggttgcattgacctcagccactcttggatggaactttcacaagacagaggtacagcagagaccaggagaggacaccatgaacatgggccccagatccctggaaagaagggatagtgaggagggaggctgatgaaggagtgaaggacctgtgctctagaagggaggaatgtaattctgtagccatggctgcaaatatatggcaacccccagacacaaagaaccctgctctttcacccctttctgcacatcctgcctccagccatcagaccagtctggcctctgaaatccattaacactagacttaaatgactgctgtcagagaaggtccaaaagagaaagagtgagcaatgagacaacaaacccttatagaaaggactgagggtggggacaaaggtagccatggaaggaattcctccattctaaaccagccttgaccatggccttgcaactcttggacgattcccttttatgccagccctgtgttgatggtgttttggagaagatggtactgttggttgtatctccacagtccttgaaccaggggccctcaaatatactggagggaagattggtggcttgggatgcagaggggatagagtcagaagtaagtctcagcttttctcagattcctccctattttgaggcatagcgcaggtcccaacacctaggagtaggatttatccctctctgccagcacaatcccctaaccacagaggtttgcccccacaaaagacaatcattactctctttagactcaggcagtgtgggagggatattccttgtgagaaacagactggaaaaatgaaaatgaaaatactgcatttccatcttttccttggccccataaagaagtcacagttaatggcatacatttagaagtggttattttttaatggaaattttatctacatgttaccctatgaaaatgtggcctgtttacaaagcaagaaggtcagtgtggcagtgtaacccaatcatgctttgtaaatgagtcaacttttcactgggctattatatatcgcacagcatttacacacgcttgttaaatgttagacattcaagaccatcaagtttaaaacgtttgggtaccgtgattatattttatcattacttgttaagcatccataatctaatattaggaatttatgtaggaactggaaaattaccatggagaaaactcattagagatagaaatttggggctgggtgcagtggctcatgcctgtaatctcagcactttgggaggccaaggcaagaggattgcttgagaccgggagttccagaccagcctgggcaacctggcaaaactctatatctattttaattttaataaataaataaaatatagagatagtaattttgcctgaagaaagaatgtatcatgagctgaaccctgccccaagagtggccatttccactctgaattccttcattttctagcaatgtacatcaccagtgctagagttagtctgagaacagctgtgaaggagttaggaaagattaatgaaaacattttcaaaaactcaagtcaagccattttattgggaaatgggaaagtatttattttaatcccttgtttgtgagcttggaaggaaataattatttgcaaattgtggaataagaacaatgtaatatttctttcagtctctcaaaactcaggcattttcctcatggcagacaaaagcctattcttgtctagttctctgtcctcataaaaggaggctccagtgtgcgggctttgctttttcatggtggagaattatttggggttgtgaaacctggagtaaagaacagaagaagaagagtctcacattttgaaggtgtaagaattgtaggaagtgagggggcagaaaatgagactgctagctgacagttttctttttctgaatgatagctttaggtcacatgcaatgattaattaaaataaacatttaaaatgttagaaaatagtatgtaccccatattaaggaccaattatgaaacaagccctttatctattatacacaagaatatttataacaaatctacagagtggctaatatcctccattttacagatagaaaattaagttcacatatataattaccagcctaaggccatacatctagaaagtgactcatctggaattcaaacccaagcctagctctcttaccaaatactactatcccctgatattatcaagagtcactaaaggaagtcaggtgagaatggatctttataattatttgtctacccattcattgattcattcatattagtcccagattgcctaacagcaacatcacaggctttgtcaagtcttagacctatcactcgctatcctggtgaccttagtgaagtcacttaactcacttaactgtgggttattgatttaaaatagcaatattgtgatgggaccaacttcaaagtgttacagtagattagtgaaatgatcatttgaagtccttggtttggtgcctggtatagtaagaactcaatagtttttatgtcaatggtggtggtgatgacaatgatgataatgcagtggtacttggagtagagatgtcatttctctactaagaaaaaccgacactagagggctaagttaatgatcagagatcctagaatcctggagcccataagcatctataggagtcactgttccttgcctttggctgcagatggaactgcaaacaatagagccacattaatgtgatgtgctatgcatctggttattcactggcccttcaacattaacagtctctgtcttgctcatacatctggaaaaagagggcaaatctcacaggctcaggccctgcagacacccagatgatatggtggtgggagcattttccaacattctccacaccaaacttagcttctctcccaggacggtgccctctcagaacccttgccagtttactcacagtcaccgaccctccaggctacggggaaatgaggacacggggcctgttcaagggactccctctcagcagccttcatccaggtgtttagcacagtggaaacagacagccatagtttcctttggacaattcgagaaattattattaaagggtgtgacaccctcgatctagaaaacaggttgccataggttttctcaagcagtatttggagctccaggagaggattttggaaccaaaggggaaacatgttggtttcttacctggcgaagtcctcttccctctctctaacccctccaccttctaagagcacgttgtcagctgctcgctctgtccctattcagatgctgccctggaagcctcactgtcattactccacttagaatatgagaaagatctcgacactaacaccagcttcttcagcagattgatgacgtggctgctaacaggctcttctcttggaggttttcaatttcagccagagtaagaagagctggataaggacttacaaattcagttccttcttctttccatgttcacttgcacatgatgattttattaaagtgatatagcatttttatttgccatgaaatcttcattccacaatttaaatgggcttctgatggctttacctgttaggtgaacttttaggaactttcatgacccatggtctaaactagaaatgttcgccctctactctagcttaaaaattgtattttaaagacagcactaggctcttcatgtgaaaataaagacaatattgtaaaatggttgctatgatgctatttttttcctctaaattatgtcaattttgctttcacattcccataaggtgtgagggtttgatgctgggttccacgttgggaagatggtgacaacacgcactttctgccacagacctgtgtgcacctggagcctgtttaccactgggcagaatttggaataaggggctggtagagacgcaatacttcaggatacatacaaattaactggcccacagcatctagtactggcatctttattaataagatggtagaggtcaggcgcggtggctcatgcctgtaatcccagcactttgggaggccgaggcgggcggatcacgaggtcaggagatcgagaccatcctggctaacacggtgaaaccccgtctctataaaaataccaaaaaaattagccgggcatggtggcgggcgcctgtagtcccagctactcgggaggctgaggcaggagaatggcgtgaacccgggaggcggagcttgcagtgagccaagatcgggccactgcactctggcctgggtgacagagtgagactccgtctcgaaaaataaataagtaaataaataaataaataaataaatggaattaaatggtacaggtgttcctttgcgctcatgaaatttccaaagtattagagatataaagtgtccatgtgacttgagtgcttattatatctagacactgtgacgtggagtatcttatgtaatcttcacaacagctctgtcgtataggtactattatctccatttttgagggaacaaagatgcagaaaggtgaagtaacaggcctaaaatcatcagctattgaatggtgaagccagtactcaaacacacttcacagacctcctttttagtcaccatgctaggctgcctctgtgggagatcatgtgagatcctgactcttctatttacaaactctgtaatattgctcaaaattgccatttccacatctgaaaaaggagagtagcagtggctgctacgttaggactgctttaaggattggaagagattaatgtatatgatatgccaaatatctgtatataggcatttggtttttggtaagtactactagggcaaagtggtgaaactccctgacttcaggagcccaattttctatggattgtccctgttttgtcacttactcttagacttctgtttcctcctccataaaatgaaaaggttggggtagggaggtgttcccagtagaatgaccataagctactatgagattcaggaatgggaaataaaatgataaaaaagagagtgaagttcactggcatctcgcatcacagaggatggagaaaaaggagactaaaaattttctagtttgccagtgagcttgataatactactagttcaatgactccgtagttaatgaaaactgtatctaatgtgtttcctgttaatgcttgtggcaaatatataaacagtttcaagtaaattctcttctgttttcagcatacagtttctttttcagtcccattctaccaggtatatataggatccaaaagagttggtatcactcccccaccccacctccaaacacacacacacacacacacacacacacacacacacactcttttcaaattactaaaaggaagtaacatacttgcacatgcaatttagctgattacatgcaattataagcatacatctgccatccaagcagagagctgcactgggttccatgcaaggataggcaaaaatagatttatctaaaccatggtggcctaagaattatcgtaccaaatttaaacttttggaggatattcagctttcccaatgtgacttcctgttttgcagaaaagagctggaagaaataataataaaagaaagctcatattcatttctgttcaccaagtggcttgttcaaaacaacattttaatgatttaagtgtaaatgaatcagaggcatatggattagatttcccttaaaatgcacaagatttttaaatgagggagagtggaataaagaatttccccaaatttagtgctccttggaattgccttttctaatgttattaaaaatcggtggtggtggtggtggggcggggtaggggtgctgattcactttgcaccgcctttggcaaataggggcgggtggggacaaggtttctaacatctcctttaaaaggaggccatacttctccttgggcatcaactaattcatcccaaccagcatttttgatgagttaagtgcaaatgaatcagtaacatacggattgcatttgaaatacacatggggtttaaaaatgaaggaaaaaagtactcggtaaagtatgtctggggttttgccaaacccataatgttcaaaaaaaatagtttgaaacaattgatgaatccctcccaggccctgccagcctcaccaggcacagtagaagcatggctgtttgggtgatcactccagttacctctcctttaaacaacactagggaacagccaggtccaaacgatgtcacctgcttagtgcctgggtggcttcctaattttaatatgcacattttctacatgaaagaggattaattcccaaatgacagagagagttaacttactcctcttttgagagcatgcaaatacagtagactgttcagccatttgttctcctagataaacatacaaggtaattgaacagagatcggaatctgtccctaaatgggttctgcatcttgcatttgctttttggcttcctcatttggcacctaaattaaaaagcagtgacctggtgcttagcagcctgtgcagagtcccacccctaagccagtggcaccccacttgtcacctgtacggaccttgttatcttcctttcctcccagatactatattttgaacaatattgtctacacaccagatgctgttattgagaaataattttctcattttcttattaatcaaaaactgccattgttagaagaccaacatgaaacacattgagttgctagcatttgagttaacagaaagaaaatatgtgttagttcccctttgcagttgaacctgggtagctctataactccagtgagtgtttctgacattgtattagggttctctagagggacaggactaataggataaatgtatatatgaaagggagtttattaaggagtattgtctcacacaatcacaaggtgaagtcccacaataggccatctgcaagctgaggagcaaggaagccagtccaagtcccaaaacctcaaaagtagggaagccaacagtgcagcctccagtctgtggtcaactgtctaagagtcccaaagctgaagaacttggagtcccatgttcaagggcaggaagcatccagcatgggagaaagataaaggctggaagactcagccagtctagtccttccacgttcttctgcctgcttttattgtagccatgctggcagctgattagatggtgcccacccggactgagagtgggtctgcatctccccgtccactgactcaaatgttaatctcctttggcaacaccctcacagacatacccaggaacaatactttgcatccttcaatccaatcaagttgacactcaatattaaccatcacagacatgttgggaatatctcatagagaagaccatttctccctgcccaggtccccaagggccatgattctagatggagaatcattagcctaagggatctgaaaggcatttcaagatcaacgtggagagatttccagaccagctccagtggaattctctaggtccgagccctccaagaattctgatataattttaacaaatctttcccaaatactaggcaggttgaaagacttggtagctctgagaatcatctcagagagaagctagagaggattgaaggctctacgaccctctccccaacacagagtttctgatgcctcagggcagtcaccagcctcttccttccatctggggcatcctgctcctcatttggagtctgaagccagttggcctgttccatttaagacttctgcagtaacttcaatggtttcaatccgtcgcagccacccaaacacctattttattttcaagaaaattaagtatatgtcgtcaaggctcgttaaagggattaagagaaatttgattttattgtttccctgctctgtttttaagggtgagatgggggaggagtgttggagggattatttggagatttatatggaaattcaaaagttacccatttcaagtcaagactttcagcaaccgtattcctgcatgtttttttatcagagtaggtgggaaggcagtttcttttgtagcatttgaaaataagtttgctctataaattcctacgaagcagacatagctctggcaaatgcctcgggagaacgatcatcttgagacagccatagaaacagtttgacattaatgaaaatgtgcaaatgagataataaatgaggatggaagaaccatttcaaaacaacctgtgaccttttttatttttttcctgccataccccctcacagagcagtaacacagcaagatagttagagagacgagccacaaaaggagtaacaactacggaagaaagaagacttttcccccctttgtctatgccctttcccattgtcaagcaccattgttaaggtgcttttgtaacattaagcagctcttggaactgaattatgtctgtggcttatgtacatttgtgctcgaatgaccaaacgttagcggaaaggttgagtcacagaggcacgaatatatgcttaattttatttccggaaagcaatcaaacaagggcacttaggccctacagtggggccaactcagaaacaagacgaacaagttcacaggccattgctgacataagatcgattggccatcctgggccatttagcaaacagtttacataggcagcctgggtactggatgtaaactaaatgaaagctatcgagagaattccctataaagtggacttgatctatattagggagcaggctaattatagggattggcatatatggattcaaagtgaaacactatatgggactagagagtggtggtcttttataccagggtggtctgaaactggggtttaatgtatgtacaatatacaaacatttttgacagaccattaacacctataatcttgtaaatatttgcaattttctagatcataaatatagctgcataagcagttctttcagaacatcatttatacaccattaaaggttaatttacaagttagtaccttatagaaagaagatatgtgggctttctgctaactttctgtaaagggagactggtgtctccaaaagcaatttgtagctctcctgtgggtctgactggagtcctattcaaagcactatttgaattcttttcatcagctcatgttcacagcaaacttaatcttctgttttagggggaaagaataacagaggggagagaaagatccgaggtcttcaggctatacttccaagcatccaactgtttatttgagcagtctcttttgataccattctcatttgtcatagtccccctgatacctgctgttgtaccttaacctccatcccaaaggactttcaacagttctagatttaaagaccccttctaggggccaagtaacaatggaagtctgacctctgaggctgccattgtgacattacattttgttaaaaatcaaagagagcaaagaaaggaggagagaaagtgttttgtgtgagactcccgtacccctcactttccagacaggtaatacagtactgtagtcccactgaagataacatagagacccaagttcctataggagctgtccaccaatcaaggtgacagaaagatgccatggaactctgggaaaaggattgctaaatgttggtcaaatctgtggaaaagccacagaataaagtcaggtgaccacagtggatttgtgttgtctctgaagaggctgagctatgtaacttactcatatgctggagcctcttctcctctgcagaaggattccattgatctctttgccctttttctgaaatatgaacagccaggtctgctggctacatgcctgcctgggctgacatgggcatcttttgtgcatcacaagcctactctgcctgttagacctcccaaacttacaggattctcgctatttttcagcagctctggttttcaagagctcattaagacatcagaaggaaatttcaagtttgcagtctacatacactctctttccctccttttctattgatttgggaacatttcccacacatatctcatgttccctgtgcttttcaggcccctcaaagtcaatgagttctcaggaataacgaataacaagacagctcttccatactcacagctcttcagcatagtgagcatagagcactgaccttgggttctacaggtttggattctaaccttagctctgccactttctgaccttagaaaaatggcagtctacttgggcttcagttttctcatttgtaaatgactacattgggctgttaacaatgacctcaaaattcctttccatgattcgtagtccatcttatttgggacccaggaaacttattagtgctatattttccctctacaaatactttggggtcttttttcttttttttggcataaacagcattacccttccccagccctctagctcaggccatatcctcatctactttttcacatttttatgtgataaccccatctaaattatacccactctgaaaagtccctcttgactctctctgctccacacatccctttccatgccagtttaatgttatttaaaaataataataaatgttgatataggctcatgggttttgtgggaagtaaagaatcacaggtattctgagaacaatctcaagatttgggcaaacagtgttctagtagtccattctcatactgctctaaagatactacctgagactgggtaatttataaacaaaaagtttaattgactcagtttcacaaggctggagaggactcaggaaacttaccatcatggcagaaggcaaaggggaagcaagcaccttcttcacaaggtatcaggcgagaaagagagaagaagggaactgccaaacacttttaaaaccatcagttctcttgagaacaccatggaggaaaccatccccatgatccaatcacttcccaccaggtccctcccttgacatgtggggattacaatttgagatgagatttgaatggggacacagagccaaaccatatcatgtgcaatgtttaataaagtcaaaattttaggctgtggttagagatttcgggagcctgaaaaggactttcacagcatggaagccaagtataggactgtacagctggccttcagtattcaagaaggattggttccaggacccccatggataccaaaatccatggatgctcaaatcccttatataaaatggcatagtatttgcatataacatatacacatcctcttatttactttaaatcatctgtagattacttataatacctaatacaatgcaaatgctatataagttgttgttatcctgtattgtttttatttgtattctttttattgttttactgtctttttgttttcaagtattttcagtcctcagttggttgaatccacagatgcagaacctgtagatataaagagcttactctattggcaaagtaaccagtcaaagggcatattatctgataggggaggcacacatgtaaaaaggtctctggaagagtatctagctactggcttttctctgggacaccagagtagataacttttataagctgtaaatgataaaatttgattttcttgacatttttcagtagtgcttgaatcataaataacactgtttatctgggcattggagatatcttccatttggaaatacaatcatttgaaccctgggctatttattgtctctttaatttcttatttggggcctcaaaggtaggcctcattgcacgagcactgtatattctgtgagaattttacctacctttgaatctaattctgtggcctcccagacacattgttgttgaatcatcatgagtctgtatgctgcttcaacctgagcccttccatcctgcccgtccatctccctccctctactgtcaaaatcactctacctacatacctttcattcaaaaccctattctcatctttctccactagcaattaactaaggtgataacctactctgtgcacattggtggtttccactgggttaacttgttaaatgtccctcctaggagtccttaagcctatctatccctgtgtaagttgagatcttctaaacagtgtgtcaggctacatgaccttagtttgccagtgtagacattcctacaaggagctataattgcataatgtccttggtttttgttgaatgtcaataaatgaaacagtcatatgaagaatgtttctgcatcttttgtaaatttgctgttaaagaccgtgtaattcaatatcccttatatgaagaaccatgtgaccaattttccttaggattcatcactaaaaaaacaaaaattatttttccgtctcaattaatcattttgtttgtgtttagtagctaacagccacaaaactcaagagtgtttagaggagtgtttttgtttttgtttttgttttaatttaggaaagggattcatctctcctcttttctgccttggctaccaagaagttcaatgcctagtcttccactcagttgtcattgatccttatcctagtttctgaactcatccagactcttcttttctccactcaataggtagtttttccgtcctcagcctcctcccaccctcgccctcaagtaggccccagtgtcccttgctcccttcctagctctcacttataagtcagaacatgtggtatttggttttctgttcctgtgttaattcacttaggaatggcctccagctgcatgtgtgttgcggcaaaggacataatttactgtaagaagtgtctgttcatgtctttgcccattttttaaatgaggttgttggatttttgtttgttaattttttaaatgtccttatagattatggatatcagatctttgttgggtgcattctccccttggtagttgtctgtttattctgttgatagttacttttgctgtgcagaagcttattcatttaattaagtcccagtcgtcaattttagtttttgttcaattgcttttggagtcttcatcatgaactcattgacagggcctctgttcagaatagtatttcctaggttagttttaggttttatatttaagtttttaatctatcttgagttgatttttgtgtatggtgaaaggaaggagtccagtttcaatcttctacatatggctaagcagttatcccagcaccatttactgagtaagaagtcctttccccattgcttgttattgtcaactttgtgaaagaccagatggttgtatgtgtgcagctttatttctgggttttccaacttatttcattggtctatgtgtctgtttttgtaccagtatcatgctgtgttggttattgtaggcttctagtataattcgaagtcaggtcttgtgatgcctctggctttgtttttttcacttaggattgctttggctatttgggctcttttttggttccataggatttttagaattttttttcctaattctgtgaaaaatattggcattttgatagaaatagcgctgaatctgtaaattatttcaggaagtatggctgctttaacaatatttattcttcctgtccatgagcatggaatgaaaactaacaaagatattcaggacctatattcaacatttcaccaaatgaacctaatagatatgtacagaatactccacccaataacaaaatatacattcttctcatctacacatggcacatactttaaaactcaccacacgcttggccataaagcaattctcaacaaatttttaaaaaaactaaaattatatcaaccactctcttggaccgcagcacaataaaaatagaaatcaataccaaaatatctcaaagccatacgatgatgtggaaattaagcaatctgctcctgaatgacctttgggtaaataatgaaattaaggcagaaatcaagaaattctttgacgctaatgataacaaagacacaacataccagaatctctgagatacagctaaagcagttttaaggggaaattttatagtgctaaacacccatatcaaaaagttagaaagatctaaaattaataacctaacatcatacctagaggaactagaaaaaccagagcaaaccaatcccaaggctggcagaagaaaggaaataaccaaaatcagaactgagtggaatgaaactgagatgcaaaaacccatacaaaagactaacaaaatcaaaggttggttttttgaaagaataaataagattgataaactgctagttagactaataaaagtttttttttttccaaatacatcttgtttccacagacaagactgtaagctggactgtaagtttctccaggatggaaatcatgctttccctttattttcaactcatcttcttcctacctgacattcttccctctttctcagtctgcaaatttttattaaatttttattaaatgtgtatgtcatcccaggaattatgctaagccctggagatttaagataaataaataaagacacaaaatgctcagaaaatgcttcacaaataactgactcctattctttgtgacatttccactgctaagaatgcaccttattctatcaggtacaggcatcctggcagttttttgggggtagttatatgacctgggccagttgtttccccatttgactcagatttctcaagtgtgaaataaagagtttaacacgatcttctccaagccctagaattccagggttctaggtcatgatagctgtttaatatgaaccagaagccatgctgactttgaactcttctctcattctgacccttcctcagcataaaagaagacaaatacatttcactgtcccctctactacacgtctcttccagataaggtgattgtaccattttaaagtcactcacaacccttctggcatattcattgtaatcgtccattttatttatatgtgttctgcaatttacacagccctcccaaacaactctggaagcaggtaatggaggagttgtcacccattttacagatgagaaagctgactttgagatattatcattattgacttgcccaaggtcatggagctcatgtaagtttctgaatggtgccaaaacagtgtcctctctcaactacatgaggcttgagcacagcctaaaagatagagtcagctcttgccatcaaaagcctggatttcatgagaaaaaaagtctgtgaacttcttaagatgcttaagtcaaaatagttttggtgaagcataattttaacccgcagcataacaaggcctttggcaaggaaacaaggaatactagggacatagtgtctgcaaggaaaatgcaacagaatgccacatacatcaagcagctttcacagtctggggatgaaagaaattagagtagggaaaaattgcaccgtgtttggggccctctgttctgtgaagttctcattcaggtctttgcaaaactcagccatgttttccctcattcccctaacccttgtgtttcatttttaaaccccagtgcctgcaaagagacatccaacgcacatgtttctgattcatttacacttaactcatcaagctctgtttaagaagagctatctggtgtccaaaatcttttggaatattttcctttccttttaataagccattgggagttgtttttatttcttgtttgttttttgttttgttttgttttgtttttactggcatgttcgtgcttgagttgagcacatgtaacaaagcagggcacttaaagagcctagtggacaggcacaccccaatctgcttagagactgagagggacatttttggttagcagagtctccgaggctccatagtcacggggcttcacaaagggagcctgaagaagcttgagacagggcagcttgcccatgaccaggcccatgtggaccaccacaaggcccagcaagaaacagacaaggctgcagacttgagggaaagggttttctctgtcctgcccagcctccagggctacaggaagagagaaaagctacataactgctggctcagaagaagacagtcatcccagggaaagacagttctgctcgcaaggtaagctgtcctaatcaccatcatcctacctctagatcctggcaaccccctcctagttggtggctctgcgtccactcttgacttccttcatcccagacataaatcagagcatgccctcccctggcttatggcttcctggagcaccttaagtaaaacccaaattcctcactacggccaaagtagtcatcatgaccaagcctcattggctcctccaacctcagcccttacgattctcctcattcactctactgcagtgaaagagcttctgttctctaacttgaacatgtccagctcatttcagtttcagggtctttttgttgtttcctcagcctgtaatgttctttttcctgcagtcatatggctgcctccatcttattctttctttctttcttcagatactcctcttcccttatcactccagctatagtagtacctccaccctaacttgctctttaatgtttaattttcttcttagcacttagcaccaccacctaaaattattttaattgtgccattgtttgtaaaattatttttttatttttattttttttggagacagggtcttgctgtatcacccaggctggagtgtagtggcatgatctcatctcactgcaacctctgccttctgggctcaagcgatcctcccacctcagcctccccagtaactgggacttcaggcgcaccaccacacccagctaatattttgtgtgttttgtaaagatggggttttgccatgttgcccaggctggtgttgaacttctggactcagttcacctacctcagcctcccaaagtgctggaattacaggtgtgagacaccatgcctggcctatatggttatttctgttggccgccaccaaactgtaagctccaggtcggggaccattcttccttagataccactgaatcttcagtgtctagagcaatacctgacacagggaagtagctcaatatttaaatgagtgtgtgactgaatgactgtccttgacaactgtttaacccagagtcatacataagcttaagaagccagggaaataaatgtctcctggtcttagagcagcagaagcaagcagacctagaagaaccccatttctgtcttggataaggtagtatcgatgcattgctctcaagtatttggccattgagtcagctgctgtgagggtgaccaggaagggcaggggattctaaaacaggtgactatagaggaccaacttctgacccaaacccttggaatattagaaggcttgatgctataagacaagttgggacatggacctgcaagagaccagagtggctcagggagattgcatccggggctgggtaagccaaggcctacatcctgcccctgaaagtcactggcaatttgcctttcagcaagccgtttaccctccctgaggctgtttccttctttgcaaaatgggcatgatagcagcatgttgtataatatcagatgtataagtaccaaacacaagatctgatataaaaagggtacccaataaatagtagctgttgttactggagagactacagtcgcaaacattctaattataatgagcccagaaaacatggttttgttacaatattaggacaatattagaacacctgtcctaataatgacctggaaaattaaccaatccaaaaattgcatttatttttctattttttattacggtataatacctttagaaagtactatcttaaccacttcaaatgcaccgttcagtggcattaagtacattgatatgattgtacaactatcacctccattcatctccagaactattttcatcttgcaaaactgacagtctatatacattaaacaacaactccttgtttcctctcccctcagttcctgggaaccacaattctattttctatctctatgaatttgactactctaggaatctcatataagtggaattatatataatatttgtcttttttgtaactggcttatttcacttaggataatatcatcagggttagcataaggtccccaaagttcatccacattatagcatgtgtcaggatttccttcctttttaaggctgaataatattccagtgtatgtatataccatattttgttaatccattaatccatccatggacaatttggttgcttctaccttttgattattgtggataatgttgctatgaagatgggttgctatgagaccatgctttcaattcttttgagggtatatccacaagtggaattgctggatcatatattaattctatttttaagttttttgaggaactaccataatatttttcactatgtagtggttttaccattttacactcccaccaatggtgcaccggttacattttgaagtggaggtttaaggagggaaatgcaatgagtgagtagaataccaagtagaagggatcctaattccacagttaccctgactgtctgggaaaatgtttcttccatttgtttcctttacatttttgccagggaaaactgatagttgatgcctgaattgggcccctgattcaacagcccaaatattttttctagatacagctgttagtgcatcttaacaccctaagacatcaatttgacacaaaagacagcaaattctaccttttccgggacatgttgcacatggctgacactccgaatctctctaaaaaatactttggtgtttcctttctttttttatatttatacataatacaagacagataaaatattttacatgactaaatttatatgtaccttcagtatccctttttcatttaacagtatagtgtgttcattttcattgttataaacagctctttgtaaatacctttatttaatgggtatactatacccagtactataactggctcatatcataattttttagccattctttgtttgacacttggatttttttcccaattttttactattataaataatgtgctgacacacaaatctttgtctgaattttatgtagtttttctaaggaagagtgtcagaactgaatttctaagttaaaaacaatggaaatttttaaggattttgataatattgtcaagtagattccaggaatacaatacaattacagacactcaccagatagggaatcttatttttattcacatatgtaattagtgcatttttaaatgttactaactgcaacacaactcattgaataaagaatattactgaaaggaaataaaaaagatataaagaaaaaactaaaagtataaaaatgtttaagttcctaaaacataagaaaaattaaaatagctaatattattgtgtattggatgtgtgtcagaaattttgttgagtatttatgtacaaaaacatctttcatcttcagaactatatagtaaggttaggacattttcagttgcaatatcccaagcaattattcatttaaatgaaaaagactgggataagtttagcttcaggtacagtttgattcagggtcccaaatgttactgtctctccctctatttcttgacattgacttcttctatgtttgcttcattctcatcaatgacaggttccccaagagcctgggccaaaatctcattgcatgtcattgactcttagcatgtcacatttctgtaaccatagtaataggacattcttattggatagatccgagtcacatacaagggcatccaaagcatgggaactgggaatggggtagagagcagaaccctaaagaaatctgggactctttgacaagggaggagtcaatggatgctgagcagcaaaagtaattctacatcccagcaactttgggaggccgaggcaggcggatcacgaggtcaggaaatcgagaccatcctggctaacatggtgaaaccccgtctctagtaaaaatacaaaaaattagctgggcgtggtggcgggcgcctgtagtcccagctactcaggaggctgaggcaggagaatggcgtgaacccgggaggcggagcttgcagtgagctgagatcgcgccactacactccagcctgggcgacagcgcgagactccgcctcaaaaaaataataataataataattctactataggcagaagctcttgctaaccacattattagatcagaaactgaggctcagagagcttatttgacttctccaagatcacacagctagtaagtagcagagagcgattgaaacacgggctcccatctgtctcaccctattagaggcactgaaaagcttgaccaggccctcacacctgcgatcctagggtaacctaactctagtccctttggggctggcaatttgcctgggttttttgcatacagctgtggtctccacatagttataattgttcaagctgaatgtattcattcattcagccagaggaggtgactcccacttattctgactggtagcttaatggacccaaggttaaaggccattagatttggaggcaggcaggttgagttcaaatcttatccctgaaaaaatgtaccttgcggttatcacttaagctaagcttcagtttcctcatctgtaaaatggactgaataacggtcccttctcttcctaaaaagaattaagtgagctaatgcatggaacctgtttagggccatgcttgcctcctcgtttttactggctagtgatgggacccaacgccccaccacaggcatcatcaccaccccttcatgtgctataatcactgatccttacctctcctcaggaaacggttgcttccaattccagatccaatatctaaagttgagcataatgcatgacagtgagacagataaattaagaaaggccattctttcacagaagaggatttaaccctgctaaaaattggagtatctgctgattaccaaggagatgaacattatgaaagggagtttattcttttttttttttttaacagcctccagacagagggcccaagcatctgtactttaaaaatttagattaaaatagaggtttcggctgaatacttctatgtaagaaccactaccatagacgattaggagaagactgtgctgttcagagtgatcagaaaaggcttaatgaagaatttcagtagagccataaaggaaaaataagatttagttgaaagtttaagtgtgatggtattaaggctaagcacacaatgaagaaaaagattaaggaggtgtcaaatacagtgtttaaaacgtatagcaaggagactgttttgggcaaaaaaagtaggtgaatgattgggcagatgacccccaaattgttaaagacttttagggtgaagtctagtcttgaaaacattggggagcacagaatatttctaagaaatggacttagtacctaatgcaggagaaactgttgaaatgaaagacagaaggcaggaaagacagagagtacatactgcagaagtccaggcaagagatgaatagggcctagatcagcactgtatttttttattactattattattatactttaagttctagggtacatgtgtacaacatacaggtttgttacataggtatacatgtgtcatgttggcttgccgcaccctgtaaatcaacttgtcatttacattagatatttctcctgatgctatccctcccctagcctcccaccccatgacaggccccagagtgtgacattccccaccctgtgtccatgtgttttcattgttcaattcccacctatgagtgagaacatgcggtgtttggttttctgtccttgggatagtttgctgagaatgatggtttccagcttcatccatgtcctgcaaaggacatgagctcatggaatactgcatagtattccatggcgtatatgtgccacattttcttaatccagtttatcattgatggatatttgagttggttccaagtctttgctattgtgaatagtgctgcaatagacatacacgtctttatagtagcatgattgataatcctttgggtatatacccagtaacgggatcgctgggtcaaatggtatttctagttctaggtccttgaggaatcgccacactgtcttccacaatggttgaactaatttacactcccaccaacactggaaaagtgctcctatttctccacatcctctccagcatctgttggttcctgactttttaatgatcgccattctaactggtgtgagatggtatctcattgtggttttgatttgcatttctctgatgaccagtgatggtgagcattttttcatgtgtctgttggctgcataaatgtcttcttttgagaagtgtctgttcatatcctttgcccactttctgattgggttgtttgtttttttcttgtaaatttgtttaagttctttgtagattctggatattagctgaaagggagtttattcttattccttttcccacagacaaatcattccctttatttttaataacttacctctcctccaattttttctcatccatgatgtatttcaattcatcatagggtataacttaaatgctttgaatgagatgattttttttgctgagggagccccagcttcactgcatttcctttgaattgtggcaaattccgttttgaggtttgtttaagggaaaggaggcttcttaaacaaaagtgtactctatgcacaatggtagtagtgtttatgggttacccccactaactcctaaaatctcagctaaaaaataatgatatgaaatatagaagccattcatgccaagctcccactaccatgtaagggaatgactatcaaatggtagctgtttggtatgtccagcttctgttaattattcctacagtgttcaatagaataaaatacctatttgaatcaacactaataaaattaaagtaactttgatctcattctagagtaatgactaagcacttcctagacaaactggtaatgagaagtataggaatttacaattccaaattctacatgtttgacttgcaggacatcaatcttgtaagctctttatttttatttaaaactatttcttattcatttattgacctacagagttatcctgtagtagcataataataataatgctaattataataataataatcactctcctgtattgagtacctacaatgtgccaggcactatcttgaatgcctcatgtacattttcttatataatcctcacagtacacctgagaagtcagtatttgtgttcccattacagaggatgtcattaaagattaaaaaactggtgtacaaagtctcatgataataaatgtcaggaccagaatcaaacccaaatatggctaactccatattagccatagtgtacgctgcttgagaactgagtttgcaacccttcagagtttgagttttatctagctcactcactgccataaaatcatatttttagccccaaattgtacactcaaagagagattttatcaaagcctgaaagctagcagtataggtatatgtttatgtaggagaatattgagtcacacgatctacagtatttcgaataatgagagagtggtatcaccatcagtggcatcatcacaggtgaccttttcaatatatgactctacgaataagatcaagacatgatacacactctgtgggtcagaatgtccgataagggtcatttgaaaaacccttgcttccttaggaaggtaaacatttatagagcaaatatcaagagataaactggctctatattatcaattgataacttgttaaaagcaattcccaataaaagcccctttgaattacctatccacaacaatatcagaatgatcaaagcagcttatatctcacattgaatgaagccttaactcatctaaatgcctctttgccaatctctcttccttcttaaaggtaaccactggggaatacaattcaggttctggcaagaggatccctgagggattccttctctgctgccacacaccctccctcagtcactcccctcctcagccatcctcttggatctaagttctgcaaaattcccaaattaggaattaagtacatgtttattccatcatgattttctcctctaatctggcagataaaaataacagaaagaaatatctctttgaagtctcattttatcctctactatcccaaaagtaaacttcaaaatgttgctggtctcctttcttcatttgaccccagtccaagcaggacagctttaagggtggaccccacatacaattccagttcaaaaaaattcctattgctttaggaatatgcagactgattttgaatatgcatcttgcccatcaccagtatttttttaagttctatttcaaaaactagagaatggatcttttattggtaacaataattctgagagtagatgaccaagagacagcttgaaagacatcttaaaagatgccttatgaccaaatacaaataatcaaaaacaaagcctaacagcttagacatttgaactgaacaagtacattagaatagtcttctgttgtcttgaaatgccttgaagtgataaaaactgtgaaactacgatatttattttgaaagatgtacaacatgaagcttaaaggtgaaagatctatttagtgtggattttttttttaagcttcaaaatgaacagtgtctgattcttaaagtaaaagctgtgagacttttgctggaagcattttaatatgtcctttagtttttcttctttagtaagatatgtcagttccacatttgttgacacccctctctgtgccatgcacagtgctaatgagaatataccagctaaggaaagtgtagcctctgcctttgaggagattaaaaactcttatgctggaaaaaatggtattacaaattctaatatacccaatataaagaactaaaaattatataacatcagtttttctacctattgtcctataatttccattttctaaacagaaagaagtggaatcccacagagagaaataataaatgttcatgctgagcaatgttcttttttcttgtgatgtctaaaagcagttttctctaaatgaaatttaaatagaaattactaatattgaaattagtaatattatcagatattctgtgttttcacccaagaagcataaggcttcaggcttcatagagcttcttcagacagtcttttgtttttatagctcgaaaattgacaacacaaagacagctattgacttggcatccaggagcagaataacacacctggtcctaatgcctgtgttttttcttccaatcttccccctctctctgttttttctctttgttgcttccctgaggatattcatatacagaactttgctcagtacaacacaaagagctagatgacattgtctgctggcagaaaagtgacaactattaggcttgggttggaagctgcagtggttgttgatttttaaggtctacacacaattattgaacaaaatattcatatgacagttaaagtgaatctgtttgtaagttttgaaagtttaggcaactcgcgtatcatttctgggcctcagttctcacattataaatatgagcactaaaccagtggttcccaaagtttgctgcacacaagaatcaccttttaaaaggagagcttttaaaaatcctgatgcccagattgcttgccaaaccaattaaatcagaatatttcaggttgggagccacataatgtcttttttttttttttttctcaagacggagtttctttttgttgcccaggctggagtgcagtggtgcgatctcagctcactgcaacctccgcctcccaggttcaagcaatttccctgcctcggcctcccgagtatctgggactacaggtgcatgccaccatgcccagctcatttttcgtcttttatgtatagaaatatatatatatttctacgtgtatctgtgagcttttttccagaagagattagcaattgaatcagtagactgagtaaagaagatccaccctcactaatgtgggagggcagcatccaatccactgagaacccatagaataaaaaggcagaggaagggcgatttgcttcttaaactgggatgaccatattctcctgccttctaacatcagagttgctggttcttgggccttccacctccaggatttacaccagaatgaccctgctctttcctccagttctcaggtctttgtccactgttggatgccctggttctgaagcctttgaacttgaactgaattctataccaccagcttctctggttctccagcttgcagatggcatattgtgggacttctcagactctataattgcatgagccaatcccataataaatctccgatatatctatatatatcccatttgttctgtttctgtggagaaccctggctaatacaaaatcacggagtttttttttgttgaagttgacaaattgattccaaaatgttataaaaatgcaaaggatatagaatagtcagagcaatcttgcaaaaaaagaacaaagttggaggctaacatggtttggctatgtccccacccaaatctcatcttgaattcccatatgttgtgggagggacctagtgggaggtaattgaatcatgggggtaggtctttctcatgctgttttcataatagtgaataagtctcatgagatctgatggttttaaaaaggggagtttccctgcacaagctctcttctcttgtctgccaccgtgtgagatgggcctttcaccttctgccatgattgtgaggcctccccagccatgtggaactgttaagtccaataagcctctttcttttgtaaattgcccagtctcaggtatgtctttatcagcagcatgaaaatggactaatacagaggcctcaagactatcaaattgcagtaatccagatatatagtattagtgtaagcacagatgagtaggccaatagagaacagataatgtaacacttgacccttattaaacaattaattgatttttcagccaaagtgccaaaatcattcaatcaggaaaagaaaatgttttcaataaatggttctagaacaactagatcataatttgaagggaaaaaaagaatctcaacccctatctcatacaaaaattaattttatatggatcacagacctaaatgtataagctaaaattataaagaagaaaatataagataaaccatttgcaaagacttcaaacaggacacaaaaagtactacccattaaaaaagtacttcatctaaattaaaaattaaagactccatttaaaaatatgtgaataagcaagccacaggctggaaaaatatattcatgtcacataggacttatattcagaatacataaagaactactaaaactcaacaacaaaaagacaacccaatttttaaaacaggcaaaaaacttgaacaaacacttcacagaagatataaaaataattagcagcacattttttaagtgctgaaattcattagacatcaaggaaatgcaaattaacatcacaatgaaatacccctcacactattttaatggctaaaaatactgacaataccaaatgttggtaaagatgtagacaactagaattcacatagattgttcatgggagtataaaatggaatcattacattggaaaactatttggtaattgattataaaattgaacatatccctaccttaggacccagcaattctactcttagctatttacctaagataaaggaaaacgtatgtccattcaaagacctgtacctgaatatttattggagtcttattcatcatagccccaaagtgaaagcaacccaaatatttatcaacagatataaggataaataaattttggtatattcatactcagtaatataaagcaataaactactaatacaaacaacagcatggatgaatttcaaaaacatgttgagtgaaagaagctagacacaaaagtatgcatacagtatgagtgcatttatataataataaaaatcagaacaacaggtgccgtgtgtgtgtgtttgtgtgtgtgtgtgtgtgtgtgttggagggaagagggtgtgcaatagactagacctctctggggtgctacaaatgtcctatcttgattggggtgtgggttacataggtatatacatttatcaaaacatttgttaaaactcatcagacttaaaatttgtatgtaagcatacaccaaaaattaaaatttcaaaaaccatttttgtgaactataaagtgttatataagtactataaagtgttttaatttttgaagtctctcatgacaaagatgagtttgaaatgattgcaatagtgaactaatgctaaacaatgacatagctctgagtttccagttttcatctgcatatttgaagtgattacatccaacaaaatgagtttattttataacttagcaaatgaatgcagcaccctttaacccactctaactaggacttttttttttgaaggcctggtgctaggagtgatctgtatctacctgtacctaaactttaagctttgacaaagtgttggcacattcactttattaactgttattcttggcaattttagtaaagtacctttaaattgaagttaaaaaaataaaagtataagaaatgtcatactggaaatcacatccttttttccccttaggtatggtagcagatggaaaggaactgctaccctatatgattttattttgtattttaacttttattttaggttcaggggtacatgtgcaggtttgctacataggtaaagtgcatgtcaagggagtttggtgtatatattatttcatcacccaggtaataagcatggtactcaataggtagtttttcaatcctctgcctcctcccactctccatccttaagcatacatgtgtccatgtgtactcagtgtttagctcccacttataagtgagaacatgcagtatttggttttctattcctccctcaattcacttagtataatggtctccagctccatcatgttgctgcaaaggacatgatctcgagggaatgtaaactactacaaccactgtggaaaacagtgtagagattctttaaagaagtgaaagtagaactaccatttgatccagcaatcccactgctaggtatttacccagaggaaaagaagtcattatacgaaaaagataacttgcacacatatgtttatcgctataaacaatttgcaattgcaaaaatatggaaccagccaaaatgcccatcaatcaacaaatggataaagaaactgtgatatatatatatatgatggaatactactcagccataaaaaggaatgaattaatggcattcgcagcaacctggatagaactggagaatattattctgagtgaagtagctcaggaatggaaaaccaaacatcatatgttctcactcataagtgtgagctaagctatgaggatgcaaaggcataagaatgattcaatggacttgggagacctcaggggaaagggtgggaggggggtgagggataaaactctacaaattgggttccgtgtacactgctcaggtgatgggtgcaccaaaatctcacaaatcaccactgaagaacttactcatgtaaccaaataccaccagttcccccaaaaacctatggaaataaattaaaaaaaaatcttattcttttttaaccaccacaacccaataactttaaaaatagaaaattatctgatattatttaccactttcaaaagactgactaggttatggtttgtgtgtttcctcacctagtaatagactttcagagacacatctgactgataaattaaatgctctgtatgctggtatttgataagaatttcatagagatttggaaaatgtgtgtgtgtgtgcacacatgctcacaggcaaacactcatgttcatgtatgagagaagagattgattttccttaaagcccactataggctctgtcctactttcatacaaacaacatactcaaatttcctctgggaaatttctgtgggaaaattggcttgtaaaatttcagcaatagacttaattgttacaaatttcattcctaggatactgagaagcataaaatttccaattgtaactcaccttttaaagttgtctttaaaagtatgagatgaaaatactcctatgatatttccttttttttctttttcttcacaagtaaacacatagtcaatcttcttaagtgtaaaatgtttcctatcagggctaatgatttccaatttatagtgattgaatttcacttaatctaatagaatcgcccagcataggaaagcacagctcaaaacaatatgtgatggaaaccattagagtacaaagcagggtgctatgtgaggtcaataacatgttgtgaaatttttgtttcagctttacatatgcagtgtatgcatttactgagtcatgggcagaaacatttgaaggccaccgcaccatgcaatggcacaaaatgtccactccacaaaagaggtgagaaaattcaaatctggcataagaacaggggtttaggagtgtcgacgtgtagaagtgcaagaggtccaggaacaaacaggaaattcccagtcagccctaaagagaggcttcattagttcattgagcacagccttagtgagatgagtaaagaagagcaggaaaattctccccaactccccagaggagaaacaattgccataagtgtcagaaacatgtcagaaagaacctaaattacctggaatgagccatgtaaaatatatggcacaagtcaagatcttatttcttctgtgacctataaatattacagtattttttgatagaaaggaatctttgagtacttcggtaaatcacctcatggagaaatctacaactacaatgtccttgtaatctgttcctctctcacaaaattttaattgaaccacaccaatgtcatttagggtgacagcaggggtgcggttggggactgtgtgtggtctttgccttgcagacaaactcctagtctctaaagagtatgaggcagacactggacaagctcctaaagacttattccctggaactgctgggctggaggtggcatcccatccttatgtatttaagaatctagagctaccagcaccctagcccaaggtatcttccctctagaacttccttctactccttttcttatttgcctgcctgctctccatacataataaactccagatgactcctttatgcctttttcctccttattccacttcttgttaaggagtttctcaaaagaaaatggatgtagatgcaattcaccctctcagttaagacactgctcagtgttggagcagtataatgctgacatgttttccttcttagcttttctgtcattaaaactgggctcctctctccccatgtataactcaactcctgcttctacccacagcttgtgactccataactgttgcaaacacagacttccctgcccagatagtcctcttcctcggtttcctcccaatagtcctcttcctcaattctccaaatagtctaattagaagagattcctctccctttccaaataatcctcttccttgatttccccctcctgttgttggccagcctgtcagacaatgatgatgatgatgatgatgatgatgatgatgatgatcacctcctactgatctccccagtgttgacctagtctttgtaacataaattttagtttacccaggacatctccatctatacctgttgtcccagagtcccagagtgactttattttaattataccccctttcactttcaaaaaaaatgtataaagcatctcagtgtggaaaagttaccctatccagtatcctgctctgcctgcttggttaactattttctggtggtctgcagctggtccatccttcaagtctataattccaaattggcctagactcaacatctcttactcccagcatcatctcaaacattacgaatggaaagctcccctggcaggatgaatcttagagaaaactatgatgttatcctggagtctatctgaccctatttttagtgtttccctacattaggtatctattgctgcataacaaaccactctgaacttagtgatttaaaacaacaatagtcatttattatcccttatagtttctgtgattcaggaattcagctcagacgtgctggggatagcttgtctctgtttcatgatgcctggggcctaaggtggaagattcaaaggttgaagatatcaaatatctggaataatctgaaaattcatttgctcacatgtctggaggttgatgctggctgtcagctgagggcctcattgtgtctgttgcctagaacacacccatacatggcctctccatgtgactggggcttccttacaacatggcggcaggactcccagggcaagtatgctgagccaggtggagtctgtatcctttatatgacgtagactcacttaactctcaagtcacatagcatgacttccaccatattacattgatcaaggaagttgcaacccactgccaagattcaagagcaaagaacattcgactactacctttacactcctttttgtaagatgatcatatgatatggcatctatacatatatatgcacatggaaacatacacatgtatgtatacatatatgtgtatatatgtatatatttgggaaatataatcagccaccccttccaagaactctgccaaccataggcaaagggtcaccattcttgttaccctcttctatcaaaattttcctaggatgagttccctgatattgtgacctgggggcgaggcttctctaatcagaaatactttaatcccttatagttgtgaggtgtgttacagttgcaagatctttgcatttggtcttcacaactctgtgaagcagataaggcaggccttattctccccattttacaggtgagaaaggacataccgagaggtaaataatttactcaaagtcgcagagctgggactcagtgcagtcagtgagatgtggcatcgggtttctttccattaccaaccaacctctacgaacggaaaagcagcacagtactgtagtctgagcccagactttggattggacaagcctggctttgagtcctggttctacagcatcatggctttggacaaagagcttcacttccctgactttcagttttcttatccttggaatgaaggcaatacaacctacctcatgcgtttagttcctgccattagattaaatgatattcgtgaagtgcataggacattgcctaacacacctttgacccccaaacagcacctaagaagttaattttaataatggtgtgtgacctaacagctgatacactacatttagagccaggctttcttaaaaagatcttgaagaagtaaacgctgatctgggccacaacaaacaaaagatattctgcatctgggtataggtgggaacgatcctcaaatcacatggcaagccaatcatcttagatcttttttcatagcaaaatattgttctttttcataagtttgtaaatgaaaccttaaaaagggcaaccaattctcaaactcctctaaacagacattactgaatgggatataggccaatattaaatctccagctcaaaaggctgaatatagaggctgctggggttgggaggtttgctttgttacacagtgtggggatgggtgctacataatgatctttgagtgggccaagctttgatggctgggcagagcacaaggttaacacaattgccaggccttcagtaagttaccctcagatgccatttaaatgtaactgtgtatgtatccgtttctgtgatggtggacccagagtcattgaaaggccctgcatttttttttttaattttaaaattctttaatcaatttcctaatttttccacaatgcacaatttccattttaatttttcaaggaatatattcatacagcacaaaaaatgaaaaagatatacagaaaagtctctctcctatccctgcttttccatgcacccaatttcacacccagaaaactgttattagtttcctgtgtaagctttcaaaattaattcatgcataaataagatgagttaaatatacattatctattcctccctttatacaaaagacaatatgttttttactttgcttttgttttgttttgttttgtttttttagctgaacaatatatcttgagaacttcccataggagtatatattttcttttatctgttatgctggattctgccacgtgaatgtctctttatttttttgtttgcttatttaaataattatttgtaacttaattattcttacaatcagaaaagataaaagtatatgttggagacaatgatgatagtagcagatcccacacacctcaatatgtagtgtgattccactattttggaaataggcaaatataaataactaaaacttaccctacaagagtccacatagaccaataaccatggaaaaatgctaggaaataacaaatatatttctcttatgggctagcccagaggaagagcctttagagtagtagactccccaaaaaggtccggtgtgcctcccctctaccacaccatggtttatgaagtgacaccatcctctttccctcctccccattttgttaatctatttcctggtcacaccctacctctgaccttcttctccagctatacgtgctcctgggtcattgctgctgcttccatgaatttaattatcatccacgggttagcaagacacacattcttgtctccagtccaggtagcttcagcacaatcacccatgtgtgtgcaccgacaaccacacaggtagtgtctgagtcacctaaggaaagaaacccactcaacctcacccaagtgaaaaatgggggttatggaagaatgcagggatggaaaggccctgcatttttctctcattgtttcaagaaaatgttcttgagtgttctacccacaaaggcagtctgatatttgccattaatgagaggcaagtgaaggggctaaattaatcagtgcttatagttcctgagagttatgccatgagggtaggggagagcctcactttagagtcctagaagttgctttgtagactcagaaagagctattttgctggtgttcagaaacagttttccattttttttctgcccatcacttaggtctgactagaaggcctctaattctgcttccaaggccaaaaggacagcagattcgctcataagaaaacccaagggatacttaaaatttacgagccagtcctcagctccttaccagtgtgaagttctcattcacgtcagcaggaagctagcctacagggcagggcatctcaattgagttctttctctgctttgctggttcagaatcaaacttgccctgtggctgctttaagtgttgatgtcttggcatccaaaagcagggagacagctccgtttctcctggcgcctggagcccatgcttcagggcagcttaccctcctcccttcgggattgctttggaatcctcactgtttataaaggaagcccacattggccccgttgtaatgtgtggcactcttcactcaatagcaatggggagttcaaaacgtcttaagtgaccctccagggtaaccaaaatcccaaatccctaatatggagtaactgtttctgccatagtgctgccttaaggagctgaacagcactttgtgttttccaaagctctttcatatacttggtctcctgtggtctggcaagccctgtgaaaaaaaagcaaggcagatatagttagtcccatttcacagataagaaaactgagattcacacagtttaatcatgctgctagttagttgtagggctgggatgcaaactcccagatcattacatctttcactgccatggctgagtattttactttctcttcctttccacccttctaattttcctctttcccttttctctccaattctgttttcctctgctcattccttgctccctttttaccttcttcctcctgctcaatatgtttctcttcattctcttcaactctcttgttctacaaaggatttcaggcaggaccaagaaccctctagaattacagcaccaactttaccgttcacccagcaatttaaacaggaacttaaataactcatagggaatctctttgcttttctgtgactcattttctccagctatgaaataagaatatcatgtttgtatttacaagaaaatagaattgtaagggttcttaagccagaagagcccaaggaaatattgatataggacctacatgtaacctatctctttagatcgaatctatatataccttgatgtagtgatttaaccttctcttaacattctgaataatgttaaactggcacatttgagttgcagccagggcattctcccccaccatcctttctacttggggaaacatgcaaactaaatattttaagagcccagtgaagagttgagtctatttggtactgtaaataaggatatctcagaaattgaaagtgaaagtattaaattctctatttgcagtccagtttaggcaggcagatggtaactaatttcattagccactgtaccatgcctcttagtgacccctctcatctcaatttttattgatttgcagatgtttgaaagaatatctgatatcaaaattactcttggaacagtgtctgatctcatttcctcccctcctctgaaaattaacgacatgaagacaagctttcatgagcacctgtctccagcctccaagccatgagggactggaatgcttagagaacaatgacttaataaatgaggatttaaatagttccatcctagagaggcaaagaaaggcaatatctcaaaaccatgtccctcaactcttaaaagtattatttctagtttgaaaagaagagtctggatcagtcagccccttctatcctgacaaatgatcagaatagatagacccctgtggaagctgtcagtaatttctgagggggcaaaacatctacaggagaatgtcactggatcatttcaaaaatctatgtgtatttgattctaggactatgtctcttcagaatcttttttatatctccctaaattccttgtctgggatggtattttaactcattattgactaaacatatgggattgtctattttgagtggattcactcttagaagacactctatgactgggagatacctgcttacaatgacaagtaatgtccaagtagggcaaatcaatctgggtcaagcctatgtcaatagacatgtgctaccctactgcacagaactgaccttctgatacccagatgtctaatagccacacatttaggggccttatggtattatttatttattatgatgatgattatgattcatcccagctaatttaactggcttcatttagctgggctgacctgaacactggccagctgcctataacagtggcctagagtaaccttcacttctcttgtgaacttggcctgtagttctttgctgcagatggcctagccaactaggatgctattggctcttcctgtgggccattcagaaattcttcaggggtccttctgaagcaaggaagggtgacagcttctgacacatggttcaggacatctgttgagcttccgtagcctattcgcttatttctctaaagtatctttttagcaccaaatacttgcctcacaaataaattgtcaaatgaccctagtttaacaaagaaccaggaattagttagcttagagaggaaggtacttaatccactaggctacatgtaattctcctaaagtttatgacaaatttttattatctttagggctgcacctttcgtatctcccaaatactgctgccagtattttgttcttcattttagtagagcataggagagccaatcaggtggcatctcagaaggaggagattggtgagaatgtctgttactaagtagtgggcatcatttgtgcctccctcgttttccttttcatgactggcatggaaatcacaatgccttccaaagaggcagaggctgagtcagatttttgctaggacaaagtaaaacttggtttcctggggagtgtagccaaactgactcagaggttaaggatctaacaattgcagcaggaaagtcaaatcagattttagtactcttaatcctatatcatcttagggctgccttccagaagccagaagtgatgagatcaaaagaaaaatgccatctcctcttcagagagtgtggctctgagaagctaaggaccgtgcctgggggaaataaacttgctctaccaagagtgttccagaatcaagaagaaatctcttggaagaaatggaatgtccactcttttcttgtgtctgtgttgggtctccaggtggtcctacgaggacagaggcacagatgtcagtatgcattgctcatttcctccatatctttcttttctccaataccaaaccagaaagcttctctgttagcatctgtaaccatttctagttaacatccacattcccttaagcaactgggaagtgaatcaagcaaatgtagcatctctaagcaaagcagtttgatttagggggaaaaaaaaaccactgccatctcacctggtgaaaactagcatgctagaaaagagcacaggatgaagcctgactgcctgggctgctgagtcaacaataggaaaaagtttctcatgctgaaaaagcaaccatagccctactaaacagtcatactttgctcacctgcccattataattacaatgtctttccagctgaaatctaataactatcaccagtgaagcatctttccttgccttgcatattcattcattcatttgttcagacaacatttatttcatgcccatttatatgccaatggtcatcaattttatgacttcacttattcattcagaaattactcatttttgaacccctataaatgggccaagtactgtcttagctactgggtatatgaagatataggagacaaagtccataacattaaaaatttatggtctagtcagtaattcacattttattcattcatctggtcattcattcattcatttgcttattcatttgacagatcgttgctgaagatctactgcatgccaggcaccatgttaggcacagggccaaacatatttatcctaatcttctccccatcttgttttgaattcattgtatcacacaaatgccaccatcaccaccaagcacagaagcaaaaacaaacccaacaacttttcaggtttggtgtgtgtttatgtttgtggtcattttaaagggagaggagggtaggcttcagatgggtgagtaaggttattgagttattccaatgtattcttgcacatatgcactggtttcgtgcagggtaagatattagaaggcagatcccagattcaggacagtacaaagtgaacctttaagtgttggtgactgtgggacagtgggataagctgtctcacaaaagtgagatgtggttggaggtcaggtgatgacccacgaaggacagcacagaacagatgctacccaggagacttgtgaccccaaatcgaaagactttctactctgagatttgattgccaaaacagtctccctggcacatactaagtcttcaataaatattcgctacatgaatgactaagtattaggccatttgttggtccttggctccttgagggagagagctgggccctaattatctcttatagtcccagcacctctgtcccttctccagggatctagggaacagatctggaatgcaggcccccacaagctttcttcttaataacctaggcataaacgttttcaccatggggtttagccacctggcagattctctccgcaaaggaggaatcctttaggggcatattcagtcatctttgttaaatttcgggttctgttttcttccctgattagcaaattgttggttcacctccatcaccgtgagaccttgtgtactcagggagcaaaaatttgttttgctatcagctagaagggcaaaatagctatataaagaaaccaaataatgccttctcaaaccaaacactagacttggcttctggtttagctctgtttagggttatctgtggccctgtttccctccagtggctggtaatcaagaagagaatgcatgattgcccctggaaaccaagtgatagatccacagcactatgggccaggcaccactgcctgaagagaggctagaggcaggggaagccaggagccgacttcaagattcttaggccacaggccacaccataattcaggtcattggactttgccaaggaagcttatcaaagaagaaaacagacttacattttctagttctctgcttctctctcagactgcaagccttagaaattagactggctttctccatcctaagcagagggagtagaggtttgagaatttgattgtttggtaatacagaatgtgtagcctagtgcagcacttaggatgccattctactttaccagaatagttcaagacacaaagaattgttcaaactggaacaagggtctgacctgcttgtttgtgtcattcagggacagcccaagtctggcagaaatagcagaaactttctgccacataactcaacccattaatttagatgaaactattactaaatgctaattctaaactttctgtactctgtacacaaagaaacttccagaatcaatgcatacagaacaaggcttgagccattgagtcctggaagaactttcacaaggcattttgatgggcaaatatgggaagcaatcaccattctagcaagagaccatgatctttctggcagcaggaggaaaatccaatttctgtgacagctacagaaaatgactgagtttgtttgtgaccatctctgaaattacgtcaggtaacaaagaagccaatatcttttcccattattgacaaagaggagactgtgttaagccagcctattggaaaacactgggtttcctctggcttttatctgtaaatgaccaccgctgggagttaagggctacaactcttccttggggaaaccccatgtcatgatatgaaagactcggtttgaagtgggcccaattcttgagacggtcatcctttctagttgtatcaccactcatttcagcaaaaaggcaatgcagtatgaattcaaggaagaaaggcaatttcctttaaaatattgtggcagagtctcctttctccagagtcaagccttggtatatcctctactcctatcattctcaaaggtgatcccaagaccagtaatacctgtatcagtatcacctgggaatcttgaagagcagcagctgcttgggtctcacccaagactcttgaagcagatactctgggatggggcccagcagtttttaacaatccctccagatgattccaatgcacactgatacatgaaaaccactattctactcttcattaagaaatctgggttccaccatgatattaaaaaaagccgtgtgtgggcggtgtgtgtgtgtgtgttcagttactgtcttagtcagttttgtgctgctataacagaataccacagattggttaatttatattaaacaggaattttttctcacagttctagaggctgggaagtacaagatcaaggcacgagcttctggcaagggccatcttgcagaatgcaccacatggtggaaggggaaagagagaatgagagagagaagaggggggccaaactcatcctttataatgaacctactcctgagataatagcattaagccattcatgagggtggaggcctcatgggccaactttctcttaaaggtcccaccacttaacactgttgcactggggattaattttccaacacatactttttggggggcacattcaaaccactatggatacacatgtattaaatatataaaagtatggatgtatatgtactaaattatggattttttaaattcaggtttttttttcaaattaaggtagtagcttctattattgaaacctcttgctgtttgatgtgataactctaagtcccttccacactaacctgcacatgttccctgtgatctgagtacggaggtgagggggcagggtgtgaaccagcaacctaagaaatcagagaacattctattgactaatttaaactagattattaagaatctactctaccatttaagattctccaaaaaaaagtgaaacatttggcctttggcatttaaatgagtctgatgaacagaagattaaatactagatatctttgtaaaagaagctgattaaaaaggctgtgggtcaggcgaggtggctcacacctataattctagcactttgggaggccgaggcaggcagattacctgaggtcaggagtttgagaccagcctggccaacatggtgaaaccccatctctacttaaaatacaaaaattagccacatgtggtggcgcatgcctgtagtcccagctacttcggaggctgaggcaggagaatcacttgaacccaggagtcggaggttgcagtgggctgagatcacaccactgcactccagcctgggcgacagagtaagactccgtctcaaaaaacaaacaaacaaacaacaacaacaacaacaacaaaacggctgtgaagcgcatgagctttggagtcagacagacttaagtccactgctgagtgtcattggtcaagtggtttagcctctgtggtcctctttctacattggtaatatgggaaaagtaatagtgctgaactcccagggctcatatgaggattaaattagataatacccacacatagcatgcttggtaaatatcactgttcaagcaacacttggtctccttgttactgttattttactgggttcacccatggtgaatagtaccagagtgtccaaagaatccttcctgtgaaatgtagattcattggatctctttggaatttttcttcagggacagtgtgagacaatgaatgagaaagagagtcactgattttggtgaacttttggggaaaggtaatggatgagaagaaaggcacaggccatggggtaagggtggaggttgcttcggatcattggcctctgaagctctgtggtggctgcagttttcctttctccttattgttacggcgtctgggcagagaggagcttcggagccagacctctgaggctgtgtgtggtgagcctgcaggggctggcagtcgctaagggcggaaaccactgtttgggagctgctggcggtttaactgtttctgttgctcattgctgaggatgagaaaagggcaggagggtgagagcaatctactcgtgattctgtttgtggtgagtctgctcaccaagagcttcaaaggtctctttggaaccaaaggtttatcaagcagcttccagaacaagattttcagctggttgaacttcaaaacaacagcctctgagattcattttgataatctccttcaaaagaaccacctggtccattgtagaagtcactggtagcaacctcatgggagatgcagctttcctcagcttacgaggtccttgctgcacacctaaaattatttaatcaggaaccttcctattgatggtgtgagtgttgtgatctgatcctctaaaatgcaaaataaccataagaagtctcctagtgcctcacaaccttaggtgtgcttctgtctcaaggctagagttatatctcagtcatcttagaattattttggtaaagaaatatgaaacctccaattaatgagtatagaaaaactgtacaacactggggagtggttaataaatcatgtaataaaacattttgcaaccattagaaaatatacttttatgtaattttaatggcttggggggaaatgctcctacggcaatatacagagaaaacagcaagaaccaagaccttgtagagcagtggatctcagagtgcggtccatggactagaagcagcagcatctggaaacttggaaacttggtaaaaatgccaattctcaggccctaccttggaactactaagtcagagactccaagggtgagcaattgcgtgttttaatagccaagtgaattgatgtgtgttaaattttgaaagcaattgatatagagcccaaatcaatggaaaatacatacatatggaagaaaatgcaccaaaagatatagtagttctctctattatagaattatggatgatttttgctttttcctgtttatcttttgtgagattttttctgtatattctactttttaaaaaatgagtatattttgcttttatatttagataaaaaagtcaaaataatagttatcatgtatttctgctacacatgtgtcatgtcaactcataccatattaagattgtcttgaagatttattcatgcatcttcagtgtttttcaatttctttttcttacaaatcaacttccctgtattttccttgatgaattttctcagcttcgctgcttatttactgactttcccacccccaagtcttaaagccccctgctattatttataaacaacattttcatcaaagatctctatgctttgtttgtcagaaacaagcaaatagttgttttttccttaagcacaatatttctttatatatatagagagagagagattaatatattttcatccattagtaacaattttaagttttgcatatattttcacacacaatgtacagtttctttgaatttatctgtttttggctacatcttctcaaagcatttttaacaacttgacccttctaatttcaagagttcatttacaaagtaagcagatatagtggatctgcatttatacaggagagttaagttctaaaatcagaagatacagccaatatcacatatgatcacatttaccccatctcagtgataccagcttagactggaacagtcttggaatagacttcatctgagtcccagccaacaaggcaagaggctatgttgtgcaaaaacgtacacctttaatcactttagcactgtgagatgctcacaccacaagagagtctcagtcagaacccaaatgaggaaataacagattccttctatcttatactcattttctgggcaatagcagatgaaattgcctgagctatttaaattactctggaggatttgttttttgttgtggtggctgatagtacagaagtgcatttgcctgggtcaaagctgcatgtggtgaggtctccccgcatctctccaataccttccagtgttccctgggcttctctctttaatatcctctcccccacccttggatagtctccccagcaggaaggactctgacccctctcctggttttcaggttgtacccatcctttaaaattctttgcaaaagcttcctcctacataaagcctccccaatcttagcagaaagtaatccctgtacattctgaatgtctttgggatatttatgcctctttattatatttacatttgaatacgacttagcttgcccaggggactcccaaggttctacaaggcagcatccaggtgtctctaacatcaatctgggctttgaatcacagatctgttctttctggccaatcttaggaaaactatcaaattcctctatgtctccctcctcatctgtagaatggagatagttgtagcagagacccctgagagttgcagtgagcattaaatgagatactacatgtaaaggggctagcacaatagctggcacatggtaaaccccaataagagctagcagtttttatttctattctccattgtgattcaaatagtacatttggactccataagcatttgttcgttggctaaatgaatgaatgaatgaatgctattagttaaatttatacacacccctctgaattctcaatgctcaacaaaaagtttatacttgtcatctgtctacaaattcaccacagaacttaatgaaccaaggatgttctgtacttaaggcaagtgcgaggtgcatatggtaaattttctgtcttgagaaatctgccaccagttctctagtttagacctcatggagctccgtgttttcacccatgaaatgtgaattataacgctgatctctgactctgcctgggtacaaggaaaacctgaagaagactaggcctttagggagaaatcttataaacagggaatgcttagggtaatttgaagaatcagagcatgagtttgtaaattagcacatttcagttacagaggttccaatcacacaggactctagatgtcgctcgatgagggcacagggcaaaaccagctgctttttgggtttgtcaagcatctcaagttatttctcaggagttggggtttggcaaagcctgaaatccacgttgccaagtccttctttccccccttaatttttaagcccatgtgtattttaagggaaatttaatccacatgtttctgtttcctttacacttaactcataaaaatggtttgtcagagcaatttgatgtcccagaaatctttggagcctttataatgatattttttagcctttcctctctcccttagacacaggaaattgttttttttttttttttaaagaaaacgaattgaactgaaagtctcaaagtcagtagtgatgggtcagacagacaagctcaaggagcaatgcatttgagaaaatgtcatctttcactgctgctcctaaggttgataggaagatagattccacacttaggcagatgtcaatcattggcaatgtgctgtgatggagtcctcagatatttgattggttgcccaccagcctgagagtctttctcctatttgtgcttctgtactgagagatctgttccatgttgcttagaatttgggtccctccaccttaatcaaatcctgaagttcagcattagaaactcatgcatacaagtagtctaagagaactgtagccactaattccaaaacatagtaactgttttgtaggatagctttccacatcgtccctagagagaaaacacagaatttggcatgcttgtattagtagccataggcaatgttctcacaaagcttggtgaagatgacattcctccaaagttagtgagtttcctgtcactgaaaggattcacacaatgtcccagatatccacagtgcaggcagaaatgtcccatgtatttgtaccacctctcagccataagaggggatatctggagttgtttgacctgcatcagctccacgttgttagccatgtcacctcttccaccctcagctggcattcatctttatttgtctccttcctggcaacatgctcaccgccagattgggctgaatctttctggacactaagggtcacagagtcttacattgtgtgacatgtaatagtttggaactaatcaaccataatggcttggtttaatctgaaatgctctaaaatcatctggctggcttatctcaacccattttcactacacagcatcagaactctgtagtgcaatggcccaagctaaggctttctctgccccaggggccaaaagctaggggaacacttgtctcccaaaacaaagctgcaaataagagatccaatcaaagaacgtcctggtggcttctacacctagccccatttagctggatttactgaatgatgaagacacagagctttgaagggcttctctccatcactaaattagcttataatagagatagaatggtgaaactctgaacctgaatggctgaatgaagaataattgataagcatgtctgtagaacatgaacaccgaaccagggtactgagactgcatatgacattgactttggatcttggaagagaatagaaaacaactgacaggaagtagccagtcttagaaattcagtgagtctacagggccaggtggatatcaaggttttacatgattaagatgttgtaggcaagtgcaatgatcagaaatctaccactcttcaacagtcttggcaattgaaaaaggaattccttggcaggaatttactttatagattaaccactttaagcctggtcctggatcatatattaccttactgaatctacagaactttatggtaagtatcattctccctattttacagatgaggaaactggggctcctaaaattacttactggggagaccaagtaacttgtccaaatttgcgtagttaaaaaaacttgtccaaatttgtgtaatcttctggaattcaaacacaagtctgttaacctccaaagcctgtactctttctttaaaagaaaaatgccggtaatcccgttccttggggagcctgaggcaggaggatcacttgagaccaggagtttgagaccagtctgggcaacatagcacgacctcatctctacaaaaaattaaaaacttagccaggcatggtggcagtcccagttaatcatgaggctgaggtgggaggattgcttgagcccaggagtttaaagctgcagtgagccataatcacatcactgcactccagcctggacaacagagtgagacctagcctctacaaaaaaaaaaaaaaaagagagagagagtgagagaaaagaagaaagaaaaaagaaaaacgtatttgtctaattacaacaaaagttcttgatattaatagaaacccattcaaacttaaagagatagagaacagagttaaaagttaaagttcttcataatcctacccccacaagataaccatgttaataagacagagtatatatttctatattttctacgcataggctaccaaaccaagagacatacatataaattttttacacaaaaatgagaactgttctagaacttgctttttaaaattcttcttgaatatctttctgtgtcaagtaatacatacctaccagatccctttaaatagctgcatggtattctattctaagaattgtcatggtttaaagtccattaaatagtttgactgatttcaacttttggtgactagaggcactactgtaatgaaatgtatgctgcctgtttatatgttattgcacatttagtgatggataattataggataatatgtaactcatgctctgtctactacacaagggcacttcctttggcttccaccaagggatgttgttgatttctcagtaagttggataccaaattttcagacaagtaattttatctttcttttggacttcatccctagggaatctaaaagccaacaattccattagacttgaggtaaaatcaacacagtccaactctgaggcagtacagttagcagagtcatgaaagtgtccttttatttattattacattcaataaatacctattgatttgttggtgttggggatgagggtacaggcgtgtgcaaagtgctgcactggatcctggttaaacagtggtaaatctggtagcatacctctaggccactggagtaaatagtatgtacaaaattcatctgctgctcaacaccaaattgttgccatccaagctgacgaagccataatatcaccagaaccactctacaatgctcactttagtttttatgccaaggaaccactaatgggaggtatgttaaaggaggttaaaccagactattgaagcaggctattttcacagtggatcaactttttaattaagcttcttattttgagataactgtagctctacacacatgctgttgagaaaaataatagacggagattccatgtgctctttttttaattattattttttttgagatggagtctcactctgtcagccaggctggagtgcagtggcacaatctcagctcactgcgacctccacctcccgggttcaagtgattctcctgcctcagcctcccgagtagctgggattacaggtgcacaccaccacgctgagccaattttttttttttttttttgtaattttagtagagacagggtttcaccattttggccaggatggtctcgatctcctgacctcgtgatccgtccaccttggcctcccaaagtgctgggattacaggcgtgagccaccatacctggccagattccatgtactctttacccaggttcttctagtggtaacatcttccatccaatgataacagtaccacaaccagaatattgatattgtcaagaaacagaacattcccatcacaacaaaaatcctttaacttgccattttatgatcacacccacttccctcctgcccctaccccctccttaactcctgacaaccactaatctgttctctatttctataattttacatttcaaaaatgttatatagatggaataatatagtatgtaacgttttaatgttggcttttttcactcaggataactcatcagggtggttatgtgtatcgaaattttgttcttgtttattgctaggtaatattctatggaattgatgtaaataacagtttattttaaccatctgttgaaggacaactgagttgttttcagttttggctaatatgaataaggctttaataaacatttgtgtacagatttttgtgcaaaccaaagtccttatttctctgggataaatgcctagtagtgcagttgctggaatatatgttaattacatgcttagttttaaaaaaaatctcccaaactgttttccagaatggttgtacaatttcacattcttactcaatgtatgagtgatccagtttcttcacaaactcaccaacatttggtgttttcttttttttttattttagttattctgataggtttaatgtgattgtggttcaatttgcattcccctaatggctaatgatattgaatataatttcacatacttattcaatggctaatggtgttgagtataattttacacatttatttaaaatgcttgttgcatttttgccatctataaaacctcttcagtgaaatatctcttcatgtcttttggccatttccgcattggaatatttggtttttattcttgaggtttgaaaagtcattatatattctagatacttgttctttgtcagatgtatggtgtattagtccatccttagcctgctgtaaggacatacctgagactaggtaatttataaaagaaagaagtttaattgactcatagttctgcagggcttgggaggcctcaggaaactcacaatcatggcaaaaggggaagcaaacacatccttcttcacatggcagcaccaagaagtgccaagcaaaagagggaaaagccccttatgaaaccatcagatcttgtgagaactcactcactatcatgagaacaacctgagggtaaccacccccatgattaaattacctcccactggctccctcccatgacacatggtgattatgagaactacaattcaagatgaaatttgagtggaggcacagccaaaccatatcgtatggcttgaaaatattttttctcactctgcagcttttcttatggtgttgaatataatttcacatatttatttcaaatgctgatttcatttttgccatctatgtatcctcttcagtgaaatatctcttcatgtcttttgcccattttctcattggcatatttggtttttatggttgagttttgagaaatctttatatattctagacacttgttctttgtcagaggtatgccttgaaaatatttttgctcactctgtagcttgtctttttagctgctgaacaggatctttcacaaaaagtaagttcatgttgttaaagtccaatttgtcattttttaatgttatggatgtgcttttggtgccaagttttaaaactcttcctagtactagaccctgaagatatttttctatgttttttctacaagtggtatcattttacattttatatttaaatttgtagtccatcttgaattaaatttcatatataagatgtgaggcttaagttgagggttgtttttttggtttggtgttttttgcctctggatgttcacttgcaccagcatcatttgttacggtactaccttttctatgttggataatttttgcacctttgtcagaactcagttggcttattagtatgggttagtttctggattctctgttctgtttcattaatctatatgtctatctctctgccaacatcagacagtcttgattactatagatacacagtaactcttgaaattgagtaaccttattcctcccaatttatttttgtctttcaaaattgttttagctattctggttcgtttgccttttcaactgtattttagaaaaatcttttccatacctaaaaaacgtcttgctgagagtttaagaagaattgtattaaatgtatatgctaacttggggagaatggacatctttactatgttgaatcttctaatccatgaacacagtatgtcgttctatttattaagatcttgatttttttccactagcattttgtagttttcagcatacaagtcctgtatgtgttttgttagatttacatttaagatttatgtgcaaaaatcacaagcattcttatacaccaataacagacaaacagagagccaaatcatgagtgaactcccactcgcaattgcttcaaagagaataaaatacctaggaatacaacttacaagggacgtgaaggacctcttcaaggagaactacaaaccactgctcagtgaaataaaagacgatatgaacaaatggaagaacattccatgctcatgggtagaaagaatcaatatcgtgaaaatggccatactgcccaaggtaatttatagattcaatgccatctccaccaagctaccaatgactttcttcacagaattggaaaaaactgccttaaagttcatatggaaccaaaaaagagcccacattgccaagtcaatcctaagccaaaagaacaaagctggaggcatcatgctacctgacttcaaactatactacaaggctacagtaaccaaaacagcatggtactggtaccaaaacagagatacagaccaatggaacagaacagaggcctcagaaataatgccgcatatctacaaccatctgatctttgacaaacctgacaaaaacaagaaatggggaaacgattccctatttaataaatggtgctgggaaaactggctagccatatgtagaaagctgaaactggatcccttccttacaccttatacaaaaattaattcaagatggattaaagactaaatgttagacctaaaaccataaaaaccctagaagaaaacctaggcaataccattcaggacataggcatgggcaaggacttcatgtctaaaacaccaaaagcaatggcaacaaaagccaaaattgacaaatgggatctaattaaactgaggaacttctgcacagcaaaagaaactaccatcagagtgaacaggcaacctacagaatgggagaaaatttttgcaatctgctcatctgacaaagggctaatatccagaatctacaatgaactccaacacatttacaagaaaaaaacaaacaaccccatcaaaaagtgggcgaaggatgtgaacagacacttctcaaaagaagacatttatgcagccaaaagacacatgagaaaatgctcatcatcactggccatcagagaaatgcaaatcaaaaccacaatgagataccatctcacaccagttagaatggcgatcattaaaaagtcagtaaacaacaggtgctggagaggatgtggagaaataggaacacttttacactgttggtgggactgtaaactagttcaaccattgtggaagtcagtgtggcgattcctcggggatctagaactagaaatgccatttgacccagccatcccattactgggtatatacccaaaggattatgaatcatgctactataaagacacatgcacacgtatgtttattgcagcactattcacaatagcaaagacttggaaccaacccaaatgtccaacaatgatagactggattaagaaaatgtggcacatatacaccatggaatactgtgcagccataaaaaatgatgagttcatgtcctttatagggacatggatgaagctggaatccatcattctcagcaaactatcgcaaggacaaaaaaccaaacatgaagagaaccgcatgttctcactcataggtgggaattgaacaatgagaacacatggacgcaggaaggggaacatcacacaccggggcctgttgtgggatcgggggagtggggagggatagcatttggagatatacctaatgttaaatgacgagttactgggtgcagcacaccaacatagcacatgtatacatatgtaactaacatgcacgttgtgcacatgtaccctacaacttaaagtataataaaaaaaaaaaagaagttaaagcataaaaaaataaacatgggagtgcaaaaaaaagattttaatttttttgagcaattgtaaatggtattgcacttttaacttgcatccatgtagtcattactagtatacataaatacaattgatttttgtatgttcatctcgtatcttgtgaccttgctgaactcatttattagttctagtggtctttttgtagatttgttgggattttctacagacaataatttcatctgcacataggaatggttttattttttcatgccagtgatttttttctagtgagcatttcaataaaatgccttttattgcattttcttgcttactattactgactagaactcacaaaattatgataaataagagtgatgagagctgcctgacttattcttgatcttagggggaagcattgtcttttaccatttactgttcatgttagctgttggatttttggtagatgttccttatcaagctgaggatgttcgttctgttgatattttctgagcgttattgtcatgaatgaatgaatgctgaattttgtttaatgctttttctgcatcaattgatatgattatgtgagtttgcgccttttatctgttaatatggtgaattacattgattggtgtccaaatattgaataagcctcgcatccattgaataaacaccactttgtcctggtatataattatttttatatgtttctgaattctatttgctaatattggttaatgattttttgcatctacatttgtgagtaatattttcttttttggcactgtctttatccagttttgttaccaagataatatcaggtttataagacaaaatattatgtgttccctcctcttttgggttggaatttgtgttaattctttaattctttttggaacgtttggtagaaaattctccagtgaaacaatcttggactagacattactttttttgatgtttctaaattatagattcaatttccttaatggttaaaagacagttaaaatcatccatttcatattgggtgagttgtgatagtctgtgttttaagaaagtggtccatttcattacaggtatcaaatttatacttataaaattatttattatagtcccttattatccttttaatatctgtacagttggtaatgacatctccacttaattcctgatattggtaaattgcatctctttttctttttcttcaacagttaatagaggtgccaattttatcttttaaaagacattttctctgtttcattgattttctctattgtttttctattatcaatgttatagatttctgctctttttttgattcatagattggaagaattttctaaaatcttttttggctttcttgtggtacaatggtgccctttcatccacaggggatacatcccaaaacccccaacagatgcctaaaatcctggataatactgaaccctatatacactatgtttttcttatacatacatacctatgataaagtttaatttataaatgaggcacagtaagttattaacaacaataactaataataaaatagaatacttataacaatattctatactaaaagttatgtaaatgtgttctctctctctcaaaatatcttattgcactctcttcacctttcttcttgtgatgatgtgagatgagacaatgcctacaggatgagatgaagtgaggtgaatagcacgggcgttgtgatgtagcactaaactactcctgactttctgatgatacatcataaagaggatcatccgcttcacatgatcctggatcgttgagccatgatgatgtcagtagttaggtatcaggagcagatgaaatcaatgactaggggcgtgtagtgtataccacatggatacgctggacaaagagatggattcacgtcctgggcaggacattgaggtggtgcaagatttcatcatgctacccaaaatggtgtacaatttaaagtttatgaattgtttatttctggaatttaccatttaatatttccagactgcagttgaccacggataactgaaaccacagaaagcaaaagcacaaattaggagagactgctgtgcttttgcaaattaaaaattgggccgggtgcagtggctcacgcctgtaatcccagcactttgggaggccgaggcgggcggatcacgaggtcaggagatcgagaccatcctggctaacgtggtgaaaccccatctccactaaaaatacaaaaaattagccagatgtggtggcaggtgcctgtagtcccagctactcaggaggctgaggcaggagaatggcgtgaagctgggaggcggagcttgcagtgagccgagatcgagccactgcactccagcctaggcaacagagtgagactccatctcaaaaaaaaaaaagaaaaaaagaaaattacaaattggatatagctaaggtgtacaattccatgttctgatatatattgtgaaatgattatcactagcaagctaattaacatatccatcatctcacaattactttgtgtgtgtgtgtgtgtgtgtgtgtagaacattgaagatctactctaataacaaatttcaagtgtacaattcagtattattaactatagtcaccatgctgtacattagatctctagaacttattcagcctgtgtaacggaaattttgtaaccattgaccaacgtctccccatttcctccccctgcccccagatcctggcaaccaccattctactctctgcttctgagttcaacttttttagatgctacactagagtgacgtcatgaagtatttctcttcttgtgcctggcttatttcttacttcatttagcataatgtcctccaggtttatacatgttgtcacaaataatagaacttcctccttttagggctacataatatttctctctctctctcgctcactctctctctcgtgtgtttgtgtgtgtgtgtgtgtgtaccacatttcttttatccattactcactgttcatgtgaaggtgattctttttataaagtattggctctgccacctactagccatgagacttgggccttacttttctcatctgtaaattcagatgcttctaatgctacttcccatcacagggttgctgtggggttcaaaagaattggtgagtataagggactcatcaagtacaggttgagcatccctaatccaaaaatccaaaatccaaaatgtaccgaactccaaaacttttcagtgccaatgtgatgctacaaactaccctgagtacgttatattttcactgtattaatgtatgtcattttttttactgttaagtacttatgtgtgaaaatgtatacaaacatgattgcttattggtagcatataaattcagagacaggaatggcagtgatgccaaacaaccacagattgtctacgtgggtggctgtgatagtgatacttttgccttctgttggttcagtgtacacaaactttgcttcatgcacaaaattagcaaaaagtgttgtataaaattaccttcagggtatttgcattgggtgtatatgaaatgtaagtgaattttgtatttagacttgggtgacatccccaaggtatctcattatatatatgcaaatattctaaactccaagaaaaaatccaaaatctgaaacacttctggtcccaagcatttcagagaagggatactcaacttgtagtcccattattttgtgatatcggtgctgttattttgtgatcactctctgatcacagaatctagaactcttcgcggtctcctcttcaggcctatggttcacctgaaaacttggttctaaaaagaaagagccattcctaaatattctattcccattggacgttatcttccttcacccccaccacccagtgttggtctgactgcagtgggtctgcccctctatatcctgagggctaccatgtggttactggaagctatcctcagcctatctgatagtagacctgtgttctgtgcttctgcccactcccaccttggctctgatttgcttaaaattaaatgatacttttctgtgagaaggtgcttgatattccacatgtgtctggctgccaattcccagaggccttttgatttgaccctgtctgtggcccagcactgcctatctagtctagacccagagtataaaagaaagccaatcccaggagacctcagggttagcatctaggcattatttctgctgatcttactctgacccattctcccagtacctcctttcacactcctttagttgaatccctaacataggtacttcccactttctcggagcctctctcctaatcccggctgccctaactgccaaatctctggccctccatggtcctccacagacctcctttcctttgctcgtctccagtttttcagtctttgctacctgtcgcctgctggaaaggtcactagcttccagcctcacacctctccaaacctgcatctgattttgtcgttcatcacatatttgtagggcacccactatgtgctaggcactatgctaaaccttggggtattatagtgaataagggatggattccctgctcccatgcaactcacagtctaaaagggagcagactaacaaacgacaagtaaagaaagtagttacaaactatggttggtgcttttagaaaaacaacagtgggggcgggcacggtggctcatgcctgtaatttcagcactttgggaggccaaggcaggtggatcacgaggtcaggagttcaagaccagcctggccaaggtgatgaaaccccgtctctactaaaaatacaaaaattagccaggcatggtggtgggcgcctgtaatcccagctattcaggaggctgaggtggagaattgcttgaagcggggaggcgaggttgcaatgagctgagatcatgccactgcactctagcctgggcaacagagcgagaatccaactcaaaaaaaaaaaagaaaaaaaaaccagggtgctgaaataaagattaatggacatgagggaagggtatttcctctctgaggaaatgatatttaagccaagacctgagagatgaaagggagccagtcccatgaaacagggacagatgttttagtcagatggaacagtatgtgcaaagatcttaaacaggacctcatatgaagctgtgcagattgttcagggcacaaacaagcctggtcatggaggtaaaggaagtgctgaaacccagccaggctctgttccccaagcagtgtgccacagtaaggggaaggaacaggttctttttctgagcctcataaagacactgtgtgagctagtagtaatctgagccttgaggtggaaagaggatggctctcagtccttttctcttggtccttgggctgcagcctgggttcacatcctgggatcttgcactcagcttacaaatacccatccccatatgcctgcccattcttagattagtctatgtttgatcttatctatcaaatgataacaactcagatttacatggcattttacatttgcttcaaatctcatctgatcttccaatttctctgtaaggtagctaaggcaggcattattcattaattataatttgcataaaataccatgaatagattttgtgttttggttagttatgtttcaataattgtatataccccctaaccaacacctaaatcaagatacagaacatttccaaccggcctgaaagtttccttctgccactgtccaaccaaatatcccaccaacccagtacaacctaggcagccagtgttttgatttctgtcactattgatcagttttttcagtacttggtcatcaggggaatgtaattgtgtagtaagtattctattgtgtctagcttcttttgcttaatctgatgtttctgagattcattcacattattgtatgtctcagtagtttattccttttttattgttgagtaatagtccatagaatgaatataccacaatttgtttagctattactctattcatgatatttgggctatttccaggttggctgttttaactaagactgctatattcttgtgtaattctttccgtgagcatttatttctctttcttgtgggtagaacccagaagtcgaagtgccgagtcataaggtatattatatttaactttgtaaaagactgtcaaacagttctccaaaggtataccattttatactccaatcagcaacctaaaggcactatagttgctccacaacctcaccaactcttggttttagccatcatagtgggtgtaaactagtatctcattttaattttattttataattctctgaggactaatcatattgagcacctttttatgtgcttattgaccatttgtatatcttctattgtaatatgactattctagcatttgcagggtgactactattaatttcactttatagataagagaattaagactcaggtcaagtggccaaagactgcaaagattcacagctaataagtaggaaacccaagtcttttactcatatctcctgactctaactggtgtttcatttccaatatattggactttttcctacaatggttctcaagctcaagctgccctcatcagtaatctttacagcatcctgaacctcaggaccttttagataagggcacagtcaaaaaatttatagatgtagacaaaagaagacatgaatgattttacattaactgaaagcaacataattttttttaattagtcatcaaaaccatcactctaattctggagttcttgtttggtacctgataccctctcaggcagagatgtattctcagtctcaactcctcaatgctgccgagctcgaaataagcccttcttgttcaggtgcaaatgtgtttcactgggctacatgtaactctcttcagcctatttgtttttaattcaatcagttaaaacagccacaatttctcctgtccatatgccacattgcagtaagttaatgtttgcttaatgaaatgtaaatgctcctgaggcttgattttctcactaatatagctggaggagatggtgaatatgtagcatgattcattctctctctctctctttctttaagaattaaatgtactttgaagttgcaaatgtcacagaaaactcccacttttccttgatgctgaagataaatcactgaaggaacaatgagaatggataatcagccttggttgtagttgtatttgacagactgagtttgagcatctgacaaatgcgtgaaacactgtgactcccctttcaaactaagagaagactatgctagctagcagggcagcccagacagaaggtgcctgttgctgtccttttaatcctctctgagcaaaatcttgtacttttctcccaaatagtgaaggaagtgaataagccattgaccttttaattccattcaacgcctttgctgtgctgcaaggtgcatccagtaggtttcacaatgcagaagaatgacattgagtatttggcatatgcagtccttgagaaagctcctctgagcttagaaagctcctctactccttagaaagtagccagagcagcccattcagactctgctctatctgatttcataggagttcagagtctgggacaaaatgaagaaagggaatttggacaggagtctgaagacagaagaactaggccagaaataaaagggtcacaccaatgtctgtgaagagaagatgggaataatagagatgaggctacaatttaaaaagatgaatcagtcaaggcttcttaaaagtgttcctacaacctcttcaactttctttttgtttttcctcctctgttcttctttcttctccaattcattaaatgcctctttgctgctatatgccttaggtcagacgctcctgacatttgtacagcaaacttcatctgacatttttagaagaaaggggacaaagtttttattttcagctgagagtaattttaatgggtaaagtggcatttacagtcaacgtttaactgatagtgcagatggcctttataattgctgggtcttattacacagttatgcgtctttattattatgcttgaatgtgcaaatagaattaacttccttgcttctcttggtatttcaaattctcactgtgattaattacaaagaattctctccttaatactaaggatctgattccatgaagttgtggagataaaccaaggagacttttccatttgtaaaatggaggaggtatttcttatggcagtagaaagctgagcaatttggcaggagactgggtcataagccacccactcaagtatcatctaaggaacacttaggctgtgaaataaatggagaaaaggacctggaaaatacggaaggcttctttagagatttattcatttagcagttagccaagggtagaggacccttttggaaatttggtcttgggggcctaaaatttaacttaagcctggattcaaatgccaaacagaagtattcctagaagaattgacaaaaaacaaaaaaatctcattttgactggcactcaggagagaaaaataaatgagggtggaaggaggagagttttctttatggcttgactgaccaccaaagctatccagattcctcacccaaatcaccacccactgagtggggccacctagggtaattaaaggatcaaatgctcctgtgctatactgtaagcatttaaaaagcaccagtcccactaatagaaacatcttgttggctttctctgaagaaaacctgaatagagaatagaattctattaatgagtgaggcacatctacattagttcctttttaaaaaagaaaacattcctgataaataacacacgtttaaagcagatttcagcacactctctggaaagagagatcacatatattgactctgaaatatcagaccatatgtccaatacaaaccaagactagctgggttgaaataaagcatttttttctttgtggcagagaagttcttctatgtgttaagtgctctatggcttcttgacatcataacatgttagagctagaagtgactttcaacgtcatctagcatgaccccctcacttagaggagaaaactgaaggtgtttttaaaaaagaaaaaagccagaagaaccttcaagaacattccagttgctgtccagaaacattgcaaatcaacctttttagatgctttagcaaaagggaaaactccagcttgccttcatctttgactcataggaaaggtgtaaatcccacccacgtagttaaagctttcttgctggactcccgcttattttgaatttaacaaaggctaaaaagcccattgtgaaatgtttgtttggagggccagaatctaaacttgcattccttgtcatggtcatttttttaaaagaagatgacagattagagtaacagaaggggagagactccagcaatgctagacataagagaccatcagaagaggatgctctttctttctggcttgctgttgttatttttattttccacatactcctaagggtatcgggtttatcaccatggctgggatggggcttggaatgtggtggacaatatgacaacaatttccttcctggtgtgtccctgaatggccagtgcagtcaacacataatcagacaatctacagctgcactgttgctgttgacaacttcattatgcctgtgatattcagctgggtaattcatttctccagcttggcaatatctcctgatatgcctaaatgggttcaatgtaattttgtaagcttttgaagatgcttacccttcccttgtgagacacgatacacattgtctccccttgtgcttagctttgtcctaatatgggaaacaatgataaccaccaccaggaaatagcattgccttgttcagctctttagtgcagattgagtctccagaccacaaaggcaggaaatattagtgattggaatgacacagtaggtcacttaatgtcccttgtaactgcctttttttaaattttatttttattttttggcctgcctctgcaattaaccttcatataaccagggcatttttctacaaaaccagatggccttgccaaggatgtaaaaatagataattaatggttctggggggggtgtgctggcctttggcatgatacctctaccctcaccaatactgtcctgaaatggaagaagcagataagaaagtagaaatatgagcatgcatagcatccaacaccaaagctgcccttttccttaaactgggaaaaagtataaaatgcattcctctgagttctctttaattcttttcaattaaacctatatgtattgaaaattatctaccatgcacagggccccagtccaagagctgagagggaaattcaaaaatcaatgaggcccgggtcctgccctcatggagatttcaatccagtaagggaattacatagagccccaagtaactctaatgaagttaggctgtgctgagagttttaacatcgttataaatactacaaggagagaggagaaagacattcattccatcgggaacatgaaagagaggtaaatagtctgtcttcagggccaccttccttattccaccagccaatctgtattcttttaagaaaatctggtctgctgagaatcttattggagtcaacgtcttagttctgagttaggactactcatcctatctgatttccaagtgcttgtttgtcgtcattgataatgatctgttcccaagtatctcaaatgaaaatggagaagatagcataaagataggtcaaagagtctttcaggttattcttttatctttttatctacctgttttcttgactttataaagctaaattctcctaagtggactcctgttggcaagtagaaaatagagactgaatctgtgacttttaactgcagatatttcaatattaagattttctttacaaaaaaaatgaggaggaagaaaaaacatagacaaaggaggaagaagaggaggaggggtctgcctaaaattgagtagtcatttatccttcagtattttgactaatcaacgaaaccgttttgacttgtctattgaatagtcacctcatggattccagcttccgtgcctactggtgaagattcatatgatttgatgggtagctgtacacatacatagggttttgaaaaagctgaaaccctgaagtctgataaatgttctattttttaatctagacaaacattggtttatgagttatcaaatcctagagtattaactatttcattttcaaattgtttgagaattctgcacaacatccttaaagtaaaccagggcacaaaaatcatctttggctttgaatcaccaataaaagacttccccagaggaacggccaaaatgagtgttgtaaatggagagggatcccaacatctctgccatggataacagtcctctaccacaaccgcactacagtccagatatccctatacaaaggcatgattgaggtccaattagccaccaacctattacacactttattcattatgaccaaatctagtgcatcaaagaatacagatggcctagggattggtcataagaagcaacctgtgctggctccttttaaagagagttaggtgaatactgccacctattgataggtgaaatttatgctacaaattcctactgatgtgctaatgcttatcagagctgatctcatttctcagttggccaaagcattttatcagcccgaacttcataattatttacatgtttttgatgaaaaataattatgttacattaatgtaaaacaactaacgaaatgtattatatttcttattatattattatacatattatgtattatttcttatttcttggcaaaggaatgaagtggaaataccacaaactttgcagagacctgggtctgagtctcagctcagtccctaaatgcacataaacaagctgattaatctctctgaacctgagtttcctcatcgataaaaagtgggtaatcctactttgtagagtgtgagaattcagagataccattgcatggcacatagaaggtatttgataaatggcagcatttatttttccactgagctattaaaagtaactattttgatgcaatgattggtaatatgacaaaccacatcatgtatcagactctggtgaactcttccacatggttcaattatcctttggcaatgctacttgtctagtatagtatctttgacatccaaaattaagacagtgtgaacataaatattataacctgaagtgtgccaattgagaaaataaggataaatgggcttcattaccaaatgtctcctgactgccctagaggatatatggggccgagcagataaagaattatgataaaatgttggaactgcatataaatggggctttgtgacctgctggataaggttgagacttagagccagacccaggaggctcacattccttcctcggcatggtgtgggggatcctgggctcatacagacaataggggattcatagcttgagaattctaatgatgactgaaaggagggtggcagccaggacaagaaggcttttcagaagcatggactccgattatcacgtcggtgctacagcccggtgagaggctgctgagaggacggatgaagctgttcttggaaagctttcagtgaagtgtttgtaacctcctttaagagaatcccgtttctcaaaaatgtggcactggaaaatcccacatgattagttcagataaacactctgtcatcggattgcactacgaggaatatgggccatctcttttcgaagagtctttttgaatgcaatgtgtctcgtctccaagacttagagaaaaattctaaaagaggctttctcaggatattttgagaccgttacttttagtctgaaaggtcaattggtgcttaaaacaaaataatcaagaactagcatgcccgtgagcagtctgcatcttttctttaggaaaaaaaaaaaaaaaaaagtctgctttggattgaatagccaatgcactcccccaccccttttcttttttctttggggattagaaattgagagggaggaggaagaagagtttcacattcattactaacaacttcgcacataataagcatattcagatacaccctggggtgttagttttcttttcctatttttttgtctcctttttagcagctttcggtaagtagcacattttatttttaaaaaaagaatcggagccgttattgagcagcctcgccctaaggaaggtcaagagattagggaacggaagtaggctggccaggctctttgctgaccacagtaagggaatgccactttcttataatttaattttgagatcctgatgaaaaggcactccctaagaaaaaaaaaaaaaaatcttcgctgaaaaaaaagtgaaaaattgttagaaaatagccatcaaaaagtgatcaatttaaatttatgtctaacaaacaaaccacatggaactaaccacagggcagacatgcatttgcagcgatatatggacattctcaaaatatggtcaggattttgcaggggaaagtggacattactggcttctgatgttggtgggctttggcctaattttgcaagtattctgaaattctatacatcatatgtcacaaatcagaggagagtatactaaaagagacctttgaatttaactggtccaatgctctcatttcacaggtgagaataatgaagcctaatgataaaaagtaacttgcccaagatcacacagctggtgaggggcagctcaaggactgaagttcaaactcccgtttcccagacccaggttctttccaatgagctaaacaactgtagtgggaaaccgcagactctcacatttcatggaaaccctgtacccatgccccctggaaatggccctcaatgttgctagaggcagctcatctgtcacagcctgggctaaaatctttacctggtgctaaatgggttcttcaaagcattctatgaatgtctaggcacattgacatgactccaaggactcagcttctgttcttttctctgtcttaaaaaaaagagcacagaccacaacctgcatgccataattatctctaggtgtatgtactggaataaattaatgtcatcatcatccgccatcatgtaggctaaaactttaagtcaccttcaacgtgtctctctctctcatcctccccatcccccacctatactattgacaatcctgtaagttctatctccaaatataagactttcatctcctaatttacatcttcacgggccttcacaccatcagtgtcttcctgcttctgggttctcaccactatccacaatggccaggccaggtggatcctaatcaactgttctggcattctcctgctcagctcactgtcacctatggcataacatccaaactctttaacatggtgttcgagctctccccaatttagctcctgcttactttttgagaccaattccatcagctcttccctgcattattcactccagtacactggactacttgtcattccctaacagccccggaactctatgccttgacactatgccgtgacgccgaacctgtttcttcttttcaacctgtagagagatcttcattcctccagttccagttcaaacgccaccttctctgtgaacattttctatgtgttacagaaagaagtaataattctatgttcccttagcacattgctcatacttttttatggcatttacttaattctgccttttattgtaattggttgcatatctcatgctaagtatatctcttttatctttgaaaagatgccctgttcatctttgaatgggagcaatgcgccctcccaaccacattgcttcatttaatatctgcatataataaatgattttctttcttaattttactgagcacttactagggctggaggtgtagtggctgaaggagaaagatgcaaaataaaacacaatccttgtatttaaaggagcttttaattgaatcagtgagacacattcgcaaatatcctaagcaagttaaataactgtgggggtggaattgggtggaggggaagttctgagtgtggaacaaacattctcagtgttccaaatgagaacattagtattatgacatggagggtggagtaatgggggaggagtagaaggaaagaaagggcaaagctgcctttagatcccatctcgtgctgtagtcattattagagtcttctctaggtctggctaatctcacttatacttctctcagaaccagagaaatcttcctaaaacaagactgtgatcatttaactccctgttcaagtgtttgatgttcaatgaatcaagcatcaaataattgcaggcttatgctaagagttatagagcaccagtctgcagagacgagacgaactccaggaaacagccagagaacaaaaaggaagaacatcctgtaaaagtgctaggaagtgggagacaaagtaagagtgtgatcaatatgggctgagattaatccagaaggattaattggaggaggcaagccttctgtggatggtcacttggcaagaaagattagacataccaagagaactttaaggttcctttcaattctgagaccccatttcccattattacttgaggtgatttatgtattcattcaataaatacatgctaagcacttcaacaaaacatcaaatatttattgaatgccttctatgtgccaggaactctgctaaaccctggacatacagcagagaataagagactttgcacttaaactcttacaatataatggggatgactgatgctaaacaatgaagtgcaataaaatataagggatataatgatggcagagtataaggtgtcgtgctttcagaccacagagcagggaccctaacagcctaggggctagaaaaatatctctgagagttgatgtttaagccaagattccaaggctgtacgggagttagccagacataggaaactgagcatccaggcagaagaacacccatcatatttgatgatctggtattcagaaagaatatagcatgtccaaggaactaagagatattcaaaatagctacagcatggaatgcaaatagaaaggtggtgagaaatttggctagagagataggaagagccagaatatgggaaatttttctagggtatgtcagggagtttatacttcatcaataggctctaagtaacgttaaagtatgtagcacaatgaatctaacctactaaatacttactaaatgtctattgaagagtagactaatgaatacatggatgaattaatgaatttcctttgcaataaacatgggctttttgactcaacttgagtatttgctctagaaagtgttgctactattatcagtggcactctccccttaggtctgcatggcacgtgtaactcatgacccctgtgaggcaaccccctaaccttagtagagttactcagtcacctagcttaccacagcagatgtaattcaagtaagtctgcattcaagccaaaatttttctagatgaaagggtaaagttttacctggcaatcattttggcctaaggtgtgcaagagaagccggactctttcttaatccttgatgaaaaacatagccctctaaacctcaagggcatgaatattcctaaattagattattcatagcaacacttccatggacaaataaatccaaggatagaaagtgatagtaaatgttcgaaggagagattttgcctttttaataagaaaagaaaaagtaagacaattgttaaaagctaaaccaagctcttcctttggccacccaggttttatgagtcactgagccctgcctcagatcggaactccagaacagacacctgttgggggtgagcgagctatcagggggagataatgtctctagaaagggggagagtttcatgaatacaagatgtcatttccaggattctaagcaattaccaggccaaagattaactctccaccctcttgtttatgatcaagagactttctcctgacttgctacagagtctcattcaaaatttgagagtttatttggctccaggtataaataacagactagtcagtgcctagcagaagagtccaaaattactcctgaagtcatcacagcagctaaacattcatttggcagagaaagaatcagaacagagctttagaaagattcttaatgctgttgctagtgtcgctgtgtgtgtgtgtgtgtgtgtgtgtgtgtgcacgtgtgcagtattcatatgtgctatcaatcggcaagtcccacccctcaacataataaacagcctgtgaaggtcatttgccattttatttcagtgagagccattaaaaatgcctacatatgcagctttctaggaaatctatttgtgtctttcattagtcatgtaaagcacaatgctgtgaaaggagccgggtatacccatatgtgtctggcatagaagcagcactggaatcttcttcctgagactgagcctcttgctgtcctaagtcccacatctgctgactactttctcagaacccgctcagacaaaagcccatgcacagcttcagcagccctgactggatttagagctttcttaagatgccccctagctcctgctaggagcttataaggaattgcgcaggtgccctgtggtgaagggatgtgacggccacttgtgtgcttctggtcccagacggctgtggaaacaaggcggtgtctggccccagaagggctgtagatcatttgcactcacagattgctggatgagctcttggatgccagacaatatttctttccctgccggttgatgtagtgacccactgcccctctgctcacccctgagtgacagtcggttcggattcagtcttgtttactatgtagctagttttctccgcaagccgtttcaaatggtcctcacggatacaataggctaagcacacactgaagtcatggtatcctttcactacacgcacacaagctacaggaatcaagccttccccaggctgcagtctagagaatacacctagcctctgagccaagctgtttacttctccctttctctccctatgcatcatttcctcttttattttgcattaagagtatcttcatgatcatggacttcggctcttgcctgtagtgatcctgttcgcattttattctttacacagaataggaaggagattcgcttgctttgcacagaggctgagccacaggagaaagcaaagccaatgtgatttattgaatgaaagcactggacaattaccaacaacttgttcctctgctgcctcgaacagcataaactggtaagtcaaatttactgttgtctttcttcatgtgaatatggagctttcttaattactgattatttttaaatgtgtatatgttgctgtggcttaaatgatacttaaaaatctgcatcttccaaagttagctgcaggtggtccatgaagaatacacacaagcacacacacacacagtggtctgcaattgtacatacacgtccctgtggagagagaggatgggggtagggaagccccatttctgataattgggcattttgtttgcagtaagcttaatcacattaagtgcttgcataactgattagcattggctatgaaaaataaattactgttttgttgtataaaatcattttccagtcaggttcctgagtacctaacaaaacacctgttgggtcaggtaaagatgggttccatcatgctgataatcctgaatgcaaacccagatatattactgtctttaatccaattttcagactgggcaagcagagtggaatgccagcactctgttcatcctgggtgagtgtgcccataaataacattatgactgtgatactgaggatatctgccaagggaatcaatggacatgtatttaaatccttgcttgatccaccactactgttgcatctgtgttatctaagtcttttctttatttcataaagatatggttgctgaggtgtactgggttcaaagtgggatgttctaagtatccagttacccgtgctgatcattggcctggtcacggccatcaggagctccactgataatcaagactgaatttgcttctgtactgggctccaaaaatccccatactcacttggtttcttcatttcctaaataagaggtaggccaacctcagcagatagagaaagtgaatgtagaaagatcttgcttttcttaccaccatccccgcccccaccagtctccttagtcttttgtttgcctggctaccccaaggctttatggcagcatcaatccatctctggtgaactcagagtccatataagtgtcatatagagtttaatgtctttggtgcactctatctgcagtatatcactggctgttcagacaaagttgtggccttgggtgtgacaaagatgaatgatgtcacaacagtgagcagcatgcttctctaaataaaaaccaaagttaggaaactggagagatgggtgaagttttgcctggtggaaaggatctccaagccactcaatcacaagagccaaggtcattctcccaggtgatttggctatttcacaaatgatggcattctaatagcaaggagaccgagttgcctactggttacaggaatggtgagatgtcaggatagttgcatatttgtgctggctcccagattaaagatgtgtcttttggaaatttccttagcctctgtggatctctgttctgccattccttctattcctaattgtttcaaagaagacatgctaaactcagttaatgttttcatgagaaactactttaggttcttttgttaaatgatgaactaagtattcaagatcattgttcatgtactttaatccagaggtcgttcatcagaaatacacagatgagggtttatgtgaggatgaggggatacatgtcccttccctcatctaagggatccagaacactctgaaggaagcatgatcacacttagggaattagaagaggagaatggagctgagaagtgatgttaaaaaaattcaaattcaaataaataggtcatgtaaataaaaaggattttaaaaaatattgattagtgataactgatttgctatacttacgaccccaagatcccaaagatcattagtattttgaaacaaacatggaagtatttttttcagagggtagttcaggtatgggtataatccatgtatagaacttatggcaactttcagttgctcaaattgctcctgttcccatgcatatggaattagcagctgcaaatgtactatgatttgagaagctctagaaggcttatttgcaccccccaaaatttgtcccatctcttagtattagggcacctgaaattctttcatcagagactcaattaagtattgatgtcttttataaaattcaaacattcctaggggaaatagtaaagtaagccactgatactttatgataaatgaatgtattaaattgtttctacctcaaaggtaacccaaaggatgtggaattagtattctattaattattctgctttgtatttgcttcatacctgtctctaagaacttcacttataattattatttcactcttcatcagaaaaataagtacgcttagggcaagttatttccttcttttatggaatatctggattagacaataccatctcaatttcctataggcttttgagagtcacattgtggaaagccaaactcattatcttttccctttctaaactcacttctctgcctatgttcctttaaaaaaaaaagggggggcaggaatctatcatgcacccagtcagctaataaggctcacagaatttgtcactgggtttcctgatctctctagccccttcatccaatcactaacaaaatgtagtctattttatttccttcatcttttgaatctgtccagcccaccccatccccattgccacaagctttagttgaagtcaccagctctcatggggtaattttttaagagctccatacttggttgtcccccaccactgttcctacatccctcccctttccagcaatcctctagctgctaccagagcaattctctaaaaaagcaaatctcaatttttccttcaaagtctccaatgctgccctgttgggtacaggttaaagtctatgattcttatcatggcatgcaagttctttggtggtctggccctgctacctcttcaggcttctttccaaaggtcctggtgtggttgatgaaatgtaccactgtgagtgtcaaagcccagaaaaacttcatgggggccctcactggtactgacttaccagtgacaccatgatgtttcccatctctatatcctaagctgaactattatacctagaatgccccttttccccttcctgctagttaattcctcattcatcattcaaaatccttctcaggcatcactttctctagcccattttcccacaacctcttatccaatgaccacatcctgtcacacagaaagttcatcactcacccctctgtgctacttctatgttttaggttttttgagaaaagtgtttagaggttaagatctcaaatctagaatcatactacctaggtttgaatcccagatttactactctttaatagtgcctcaatttctatctgtgtaaaatggagataataatagtcattccttcacatggctattatgggattcaatacgttgatacatgtaaaaacactgcaacacactgaatgcttatgtttctccgaaagccaaatgttgaaatcttaacccccaaggtggtggtattaggaactgaggccttcaagaagatattaggtcataagaaccctgccctcatcattgaagttagtgcccaaccccagagagctaactagttccttccgccatgtgaagctatagcaagagggttctgtgtttgaagcagaaagtcagccctcaccaggcaccaaatctactggttgccttgatcttggactttccagtctccagaactgtgagaaataaatgtttactgtttacaagccacccagtttatggtatttggttacagcagcctgaagggactaagacaggtattattctaaatagcacctggctcatagaaagtgttatagaagtgtattagtctgttctcacactgctactaaatgaaatgtataaaggaaagactgggtaatatatgaagtaaagaggtttaatggaatcacagttccacatggctgtggagggctcacaatcatggcagaaggcaaaggagaagcaaaggcatatcttacatggcggcaggcaagagcacttgtgcaggggaactcccatttaaaaaatcatcagaactcatgagatttattcactaccatgagaatggtatgggggaaaccgcccccacgattcaattatctccaccttgccctgcccttgacatgtggggattattacaattcagggtgagatttgggtggagacacagccaagccatatcaagaaatataagctagtattattagtccataatttcgcataccacactatttcatagctatgcatttgcataactgacttcctttctagcgtatgagctccttgggaacaggtagggtaaccagctcatttcaatttgcctagtactttcccagttttagctctgaaagtactgcatcctggaaaccctctctcagtcctgaacaaactaagacagttggttaccctatgtgggatactatcttacttactttttaatcccttgggtctatcacaggatacacaggttacaaagtagatcatccataagtatttgttgaactgtagaatcaatactaatcatctttctatcctcttcttcataaatgtatgctttcatacttcaaaaatagtgttcctcttgccaaggagttactgctgacttttcaaaacttatcacttaatatatatacattaaagtgcacaggaactagaaaggtggcttccactctgtgtcatcattgtaataggattggccaccctttagcactcaaagacacacctgttatgttaacagcaggtggggaatggaaagagtctaactttcttttctgcctagtgacaggcaggttgaagccttaaggtcccctagttcacatcacagctagaaaagcaatcttttgcttttagaagccaattgcttctagagcttctcaaatcatagtacatttgcagctgctaattccatatgcatgggaacaggagcaatttgagcaactgaaagttgccataagttctatacatggattatacccatacctgaactaccctctgaaaaaaatatttcaatcccagtcagaaatgtccctctcactgactatatctgtctacccacctgtcaagcatggttagaactcctattttgaatatgctatgtcttacaactgcttctcatccagactggctcagaccttttgtcatagtacaaatatgctgagaaagtcccacaaccaagctccactgaaacatgaactctggaggtgccagaactcacaacatgacaggaagtcttgacttcagaatcaagatctagggagatgaagctgacaggcagccagatcaagttcccttagaaataataatagcagagttgttgtaagtatggactttggagccagagttcaaatcctgctgctccatttactggctgtaacatcttggacaggttagctaacctctctgggcctcagtaaaatgagaatatggtcaaagcagctatttcctcagataattattattatatcttgttttagcatgtaaaaacaaaacttaaggtaaagccaattgcaaattatctattgggtattgggagatacaacctcagggcatcaagagtgaagaaaaaagggaagtgagtcaaggaagaaaggaaaacaaaggtggctgtaactgaaatagcacttgcttcacaagaaaacacatcttgttgttcttttatatatgttggcttccaggtagccctcagaacagtctatagcaagcaatagagaagaaattatctactggctactgaaagtctcctgtgtctcactggtccaatgttctccattttcggtggtgttactcagtctcttagggtagccacaagcaaagcgaaggcctccatgggtcttgttgggtcagggctgctgcagctactgtcacaacaagcatgatggagaccatatcaaaacacgccctctccctgagacagctggtagtttaggagacaggatgatggcggcaatcgaggctctctgcttatgtaagcagcaaagcccagggaacaggtgcttgtgaagccaacatgaggaggctccactctgcacaggctactcttcccattttggacctgcattctccaggccaatgtactatttttttcctatgttttgttctaaacattttatagttttagcttttacatttaggtctaggatgatctatttcaggttaatttttgtatatgatgtgaaatagggattgagggtttttacatttttcagtatggatataccattgttctagtacaatttgttgaaaagattatcttttttcctattgaattaccttgacatctttttcagagatgaattgatcatatacgtacaggttgtttcctggctctctatgctgtgtcattcatctatatttctatctttatgaaattgtctttatctatatggctagccttaatctaatcctgtatgtcttaattactgtagcttcttagggagttttgaaatcacatagtgtaagtcttccaactttgttcttctttttcaaaattgttttggctattttagatcctttccatttctgtaaaaattttagaatctgcttgtcaatttctactgaaataaaaagcctgctaggattttgattgagattgcattgaatgtatatgtcagtttggaagaactgacactttaacaatacctattcttccaatccatgaacaaggtgtgtatatatgtgtgtatatatatatatatatatatcttctttaatttcattatttaatatcatgtcatgttcagcatccaggcttttcataagtagatttttatagatttattagattattctatgtaaactttcatgttatctgcaaatgaagactatctcatttctttctttccaatatatatgtcttcgacttatttttcttgccctacttcactggctaggatgcccagtacaatagaaaaagtaggagtagacatttttgccttgtttctgatcttagatagaagagcttagtctttactcattaagtatgatattggctataggttttaaaatattcttttaatcagattgaagaggttcccttacattcctgaaagatttttttaccatgaataaatgttgtatattattaaatccaattgctttttatgaatccatagagataatcatatagtttttcctccttgtcctctcttttaatatattaaattacattgacattaatgggtagataaatgttatactaaccttgccttcttggaatgaaccctgcctagtcgtgatgcattatcctttttataatatacattgctggatttaattttgctaacgttttgttgaaattttttgcctccatgttcatgatagacattggtccataccttttttttcatgtcttgcctttttcctggttttagtatcaaggcagtactagccttgaaaatgaagccaaagttttggaagagttgtatgtcgaattggtatcattccttaaaggtctggtaggctgtaacatttaacatgacatttattaaagattttaggataaagtattagcatacggaaaaagaaaatgtaaaactagaaattaacattcccataaaaggtggtctcctagctaatatctcctaaagcctggtcctatagccaagttgtagagaccagcccacctttgaccaaccgtgtgtttccctctctttggaactcgggtcccctacatctttattaaggaagaaaatgatacatcttgttgcttaaagcaaaccccatgggatttaatttcattattaaatattaagtattattaaattaaaataacatctaacaattgaataaatgaatagtggcatatccatacaatggaatacgtctcagcaataaaaactgaaggactactgacacgaagagtatagatggatctcaaaatgtttacgctgatttaaagaaggtggattttaaaagtgtgcatactgaatattccatgtgtatattcaagaaaatgaaacatgatctatagtatcagcaagaatgttgatacttccctagaaactgtgggggcagtgaagggattttaatcaggggaggggggaaaagattacaaaaagacacaaagaaacttttaaggataatgtatatgttcattatcttgattgtgacaaatggtttcatgagtgaacacttatgtcaaagctaatcaaattgtactttttaaaacatgcagtttattttatgttaattatacctcaaaagacctgttaaaggataataactaatatttattgaacacctattttttcaagcactctgctaaacaatgtatacgtatttgctcatttaaaattctgatatccctttttggacaatacatgactactattaacatgaggaataatgttaattatgaggaaattgaggttcagggaagctaaataagttgctcaaggtcatacagttaataagttaaaaagtcaaaacataaataaagttcaatcagtgttatatcagagccatacttttaatactgtgcttaaaaccaccataaagaatggaataaaatatcctgaatggtattgcctaggttttcttctagggtttttatggttttaggtctaacatttaagtctttaatccatcttgaattaatttttgtggaaggtgtaaggaagggatccagtttcagctttctacatatggctagccagtttttccagcaccatttattaaatagggaatcgtttccccattgcttgtttttgtcaggtttgtcaaaaatcagatggtcgtacatgtgtggtgttatttctgaggtctctgttctgttccattggtctatatcactgttttgtaccatgatgttttggttactgtagccttgtagtatagtttgaagtcaggtagcatgatgcctccagctttgttctttttgcttagaattgtcttggcaatgcgggctcttttttggttccatatgaactttaaagtagttttttccaattctgtgaagaaagtcattggtagcttggtggggatggcattgaatctataaattaccttgggcagtatggccattttcacgatattgattcttcctaaccatgagcatggactcttcttccatttgtttctgtcctcctttatttcgttgagcagtgatttgtagttctccttgaagaggcccttcacttcccttgtaagttggattcctacatattttattctctttgtagcaattgagaatgggagttcactcatgatttggctctctgtttgttattggtgtataggaatgcttgtgatttttgcacattgattttgtatcccgagactttgctgaagttgcttatcagcttaaggagattttgggctgagatgatggggttttctaaatatacaatcatgtcatctgcaaacagggacaatttgatttcctcttttcctaattgaataccctttatttctttctcttgcctgattgccctggccagaacttccaacactatgttgaataggagtggtgagagagggcatccctgtcttgtgccagttttcaaagggagggcttccagtttctgcccattcagtatgatattggctgtgggtttgtcataaatagctcttattattttgagatatgttccaccaatacctagtttattgagagtttttagcatgaaatgctgttgaattttgtcaaaggccttttctgcatctttgagataatcatgtggtttttgtcgttggttctgtttatgtaatggattacgtttattgatttttgtatgttgaaccagccttgcatcccagggatgaagccaacttgatcttgatggataagctttttgatgagctgctggattcagtttgccagtattttattgaggattttcgcatcgatgttcatcagggatattggtctaaaattctctttttttgttgtgtctctgccaggctttggtatcaggatgatgctggcttcatcataaaatgagttaaggaggattccctctttttctattgattggaatagtttcagaaggaatggtaccagctcctctttgtacctctggtagaattcggctgggaatccatctggtcctggactctttttggttggtaggctattgattattgcctcaatttcagagtctgttattggtctattcagagattcaacttcttcctggtttagtcttgggagggtgtatgcggccaggaatttatccatttcttctagattttctagtttatttgtgtagaagcgtttatagtattctctgatggtagtttgtatttctgtgggatcggtggtgatatcccctttatcattttttattgcatctatttgattcttctctcttttcctctttattagtcttgctagaggtctatcaattttgttgatcttttcaaaaaaccagttcctggattcattgatttttttgaagggttttttgtgtctctatctccttcagttctgctctgatcttagttatttattgccttctgttagcttttgaatttgtttgctcttgcttctctagttcttttaattgtgatgttagggtgtcgattttagatctctcctgctttctcttgtgggcatttagtgctataaatttccctctacacactgctttaaatgtgtcccagagattctggtatgttgtgtctttgtttcattggtttcaaagaacatctttatttctgccttcctttcgttatttacccagtagtcattcaggagcaggttgttttgttcccatgtagttgtgcagttttgggaaagtttcttaatcctgagttctaatttgattgcactgtggtctgagagacagtttgttgtgatttctgttcttttacatttgctgaggagtgctctacttccaactatgtggtcaattttggaataagtgcgatgtggtgctgagaagaatgtatattctgttgatttggggttgagagttctgtagatgtctgttaggtccacttcttgcagagctgagttcaagtcctggatatccttgttaaccttctgtctcgtcgatctgtctaatattgacaatggggtattaaagtctcccatcattattgtgtgggagtctaagtctctttgtaggtctctaaggacttgttttatcaatctgggtgctcaggcaaggacttcatgactaaaacaccaaaagcaatggcaacaaaagccaaaattgacaaatgggatctaattaaactaaagggcttctgcacggcaaaagaaactaccgtcagagtcaacaggcaacttacagaatgggagacaatttttgcaatctactcatctgacaaagggctaatatccaaagaactgaaacaaatttacaagaaaaaaagcaaccccatcaaaaagtgggcaaaggatatggacagacacttctcaaaagaagacatttatgcagccaacagacacatgaaaaaatgctcatcatcactggtcatcagagaaatgcaaattcaaaccacaatgagataccatctcacaccagttagaatggcgatcattaaaaaatcaggaaacaacagatgctggagaggatgtggagaaataggaacacttttacaccattggtgggagtgtaaactagttcaaccattgtggaagacagtgtggggattcctcaaggatctagaactagaaataccatttgacccagcgattccattactgggtatatgcccgaagaattataaatcatgctatataaaggcacgtgcacacgtatgcttattgcggcactattcacaatagcaaagacttggaaccaacccaaatgtccatcaatgatagactggattaagaaaatgtggcacatatacacatggaacactatgcagccataaaaaagtatgatttcatgtcctttgcagagacatggatgaagctggaaaccatcattctcagcaaactatcacaaggacagaaaaccaaacagcgcatgttctcactcataggtgggaattgaacaatgagaacacttggacacagggcggggaacatcacacaccagggcctgtagtggggtggggagctgggggagggatagcactaggagaagtacctaatgtaaatgatgagttaatgggtgcagcaaaccaacatggcacatgtatacctatgtaacaaacctgtacattgtgcacatgtaccctagaacttaaagtataattttaaagaatggaataaaatgtaatgatagacttcaacctgtgggtttttcagtgaaaatggctaataaggaacgctctcttaagagtgatatcccagatttaacacaacagatacagtttccttgtccagtctttttaaaggactctatatttattttacctgccgtatatttatttaacacttgaggtttctttttttcagttcagtttaaagttgcaaagagtaccgttgctatccatttcaagatactcttatggatgctatagagattacatgatgtattattcaagatcccagcaagaatcatatagtgcattcaaacagaagaacagaggggaggttactaataagaacacttacaaaagaatgggcaagttagtgaaaaccagtaaggaatggtaaagcctgaagggacaaaaggaggagcaatttctgtaatgcagaggaaataagttgtattgaaagggataccccacagatgaagaggggtaaatatcactaccttactctccaatttccagccagtgcctcccattgggtgggcaatatcaaggcttctaatccatgaacaaggaatgtctttctatttgtttatatttttcttaatttatttcaatggtgttttgtattttctgaaaattagtttttttacttcttttgttaaatttatttctaagtattttaatcttttgatgctattgtaaattaaattgttttctttatttcatttccatttcattgtcatttaaatcagaaaggagaaaaaatacaaaaataaaagataagtttatgctctctttatatttatactgtattttatatttttctgtataatttccttctcgatgctttctcttttttaactttggtttaagttcagggtatcagtgcaggtttgttatataggtaaacttgtgtcatggggttttgttgtacagattgtttcatcacccaggtgttaagcctagtacccattagttgtttttcctgatcctctccctcttcctatccttcaccctctgaaaggccccagtatctcttgttcccctctatgtgtccatgtgttatcatttagctctcacttataagtgacaacctgcaatatttggttttctattcctgtgttagtttgctaaggataatggcctccagctccacccatgtccctgcaaaggtcataatcttgttctttttatagctgcatagtattccatgttatatgtgtaccacatattccttattcagtctatcattgatggacatttaggttgattccatgtctttgctactgtgaatagtcctgcaatgaacatatgcatgtatgtctttataatacaatggtttatattcctttgggtatatacacagtattgggattgctgagtcaaatggtatttctgtctttaggtctttgaggaatcaccacactgttttccacaatggctggactaatttacactcccaccaacagtgtataagtgttccttttcctccacaaacttgccagcaactgttatgttttgactttttaatagtagccattctgactagtgtgtgatggtatctcattgtggttttgatttgtatttctctaatgattagtaatgatgagcttttttcatatgattgttggctgcatgtatgtcttcttttgaagaaaaagtgtctgttcatgtcctttgcccactttttgatggggttgtttgtttcttgtaaatttgtttaagttccttgtagatgctgggtattagacctcgtcagatgtatagtttgcaaaaaatttctctttttctgtaagttgtctgtttactgtgttgatagtttcttttgctgtgcagaagctctttagtttaattagatcccacttgtcagtttttgcttttgttgcaaatgcttttggcatcttcatcatgaaatatttgcccatgcctatgtcctgaatgacacagcctaggttgtcttccagggttttttttatagttttgggatttacatttaagtctttaatctatcttgagttaatttttatatatgatgtaaggaagggttccagtttcagtcttctgcttatgcctagccagttatcccagcaccatttattgaataggggatcctttccctattgtctttatcaactttgtcgaagatcagatagttgtaggtgcacagtcttatttctgggtttgctattcttttccattggtctatgtctctgttcttgtgccagtaccatgctgttttgtttactgtacccctgtgttatagttcaaagttgggtagcatgctgcctccagctttgttctttttgcttaggattgtcttgactattcgggctctttttttggttttatatgaattttaaaatagtttttgctagttctgtgaagaatgtgaatggtagtttaataggagtagcattaaatctataaattgctttgggcagtatggccattttcatgatattgattcttcctatccatgagcatggaatgtttttccatttgtttgtgtcatctctgatttatttgagcagtggttttagttctccttgtagagatctttcacccccctagttagcagaattcctaggtattttattctttttgtgacagttgtgaatgggagtagattcctcttttggctgttggcttgactgttgttggtatataggaatgctagtagttttggcacattgattttgtatcctgagactttgctaaagttgtttatcagtttaagaagatttggggctgagactgtgggattttctagatataagatcatatcatctgcaaacagggatagttttgacttcctctcttcctatttgaatgccctttctttctttctgttgcctgattgccttgtccagaacttccagtgctatgttgaataggagtagtgggagaggacatccttgttttatgccggttttcaaggggaatgcttccagcttttgcccattcagtatgatgttggctgtgagtttgtcatacatggctcttattattttgaggtatgttccttcagtacctagtttattgagagttgttaacatgaagagatgttgaattttatcagaaacctttttttcatctattgagataatcatgtggctttttttctttagttctctttatgtgatgaatcacatttattgatttgcatatgttgaaccaactttgcatcctaaggatgaagcctatttcatcatggtggatatactttttgatgtgctgctggatttagtttgccagtattttgttgaggatttttgcatcaatgttcttccaggacattggcctaaagtttttttttttattatagctctgccaggttttggtatcagggtgatgctggcctcatagaatcagttagggaaaagtccctcctttgcaattttttggaatcgtttcagtaggaacgataccagcttttctttgtacatctggtagaattcagctgtgactccatctggccctgggctttttttgcttggtaggctatttattactgcatcaatttcagaactcattattggcctcttcagggattcagtttcttcttggttcagtgttgggagggtgtatgtgaccaggaatttatccatttcttctagattttctggtttatgtgcatagaggtgtttatcatattctctgatagttgtttgtatttctgtggagtcagtggtaatatcccccttataatttctgatgtgtttatttgaatattctctcttttcttctttattattctagctaatggtttatcttttttttttttcaaagaaaaagctccttgattaattgatcttttgaatggtttttcatgtctctacctccttaagttcagctctgattttggttatttcttgtcttctgctagctttgggatttgtttgctcttggttctctaggtttttttgttgtgatgttaggttgttaacttgagatctaacttcttaatgggggcacttagtgctgtaaatttccctcttaacactgccttagctgtgtcccagagattctggtacattgtatttttgttctcattagtttcaaagaacttcttgatttctgccttaatttaattatttacccaaatgccattcaggagcatattattcaatttccatgtaattgtatggttttgagtgaatctcttagtcctgagttctaatttgattgtaacgtggtccaagagattgtttgatatgatttcagttctgcatttactaaggagtgttttacttccaattatgtgatcaattttagagtaagtaccatgtggtgattagaaaagtgtatattctgttgttctggggtggagagttctatagatatctatcaggtccatttgtttcagtgttgagttcaggtcatctttgttaattttctgtcttggtgatctgtcttatactgtcagtggggtgttagagtctcccactgttattgtgtgggagtctaagtctctttgaaggtctctaagaacttgctttatgaatctgagtgctcctgtgttggttgcatatatattaagatatttaagatagttagacattcttgctgaattgaaccctttaccattatgtaatgtctttcttggtttttgttgttgttctttgttggtttaaagtctgttttgccagatagtaggattgcaaattctgcttttttctgttttccatttgtttggtagcttttcctcatccctttattttgagtctatatgtgtcattgctcaattatttatctttcttcatgtggatttgcattactatctagtgttctttcatttcaacctgaaggtgtcgtgtttgtgtttattgtacagtaggtataatatcaaagtttttgtttatctggcagtatcttaatttcctctgtatttttgaaatgtagttttgttgggtagagaaattcttgacagtcttttttgttcatcactttgattatgttttaccacttctttttggcccctgtgatttttggtgaaaattagctgttaatctttttgaggatccttgtaatgtgatgagtcttttctctcttgctatctttaactttctctctatgtctttggcttctaatggtttgattttgatgtatctagatgtggctctctttgagtttattctacttaatgttcattgagcctgttgatgcatagttaaataggggcatattttggccattatttcttcaaatagcctttctatacctctcttcttctcctgggactcctattatttgtatattggtatacttgacagtgttccaaggatctctgcactcttcacatttcttcatattttttcactcctcatactggataatcttgattgatctatctttatgtttgctgattctttcctctgcctgctcaaatctgctgttgagtatatttttcatttgttaatgtacttttaaattttagaatttctatttagttcttgattttcttcataatttctatctctttattatattttctatttggcaagacatcattctcagaattttctttatttctttgggtatggtttagctctttgaacatatttaaaatagctaatataaaggtctttgtgtagtaagcccaatatttgggcttctgcaggaatcatttctattgactgctttatttcctcgtatgggacatagtttctgtttctgtacatgcctcatacatagttttcttgaaaactaagcattttattaatgatgtagcaactctggaaactatattaccccttctccccagtgttcattgttgtttaatgagttttcagaattaaatttgtaaaatctatatttttttgttatatgtggccactgaagttgctacttggttaacttagtggtgagttaatgattgaacagagatttccttaaatgcctagaactgataagcatcctagtttttgctgaagagctctgcatgtgtgtgttggggcacaccttcaatactcagccaggcagctgaaaataccaccttagtcttcacttcctgcttgcagagccatgaagtcagacagagatgagattttaggatcttctcaggtcttttctgagcatgctccctgccctgtagtctgttagattctcaggaaaatgacagagcttttcaaagctctctgtggacatctaattctccatctaacatagttaaactactgttaaacaattactaatctttgtttttggaaagaaaaaaaaacaacagaaaaaaaggctattagcccttcatgagctctaagtcagagcgaatgaagataagccttgtgagtaggattttctagaaaacccccagacagatgaaataatgacagttctctggaagaggcattttaaaggagctacaaccccattctgcccccttccagtggctgacaggctactgtttttttgtttgtttgtttgcgtgttttttaattttactttgtgttctgggatacatgtgcagaatgtgcaagtttgttacataggtatacatgtgccctggtggtttgctgcacctatcaactcatcatctaggttttaagccccgcatgtattaggtatttgtcctaatgctctccctccccttggccacacccaccgacagaccccagtgtgtgatgcttctctccctgtgcccatgtgttctcattgttcaaccccacttatgagtgagaacatgcagtgtttggttatatgttcctgtgacagtttgctgagaatgatggcttacagcttcatccatgtccctgcaaaggacatgagctcattctgttttatggctgcgtagtattccatggtgtatatgtgccacattttctttatccagcctatcattgatgggcatttgggttggttccaagtctttgctattgtaaacagtgctactataaacatacatgtgcatgtgtctttatagtagaatgatttataatcctttgggtatatatccagtaatgggatcactgggtcaaatgatatttctggttctagatccttgaggaatcaccacactgtctttcacaacagttgaactaatttacactcccaccaacagtgtaaaagcattcctgtttctccacatcctctccagcatctgttgtttcaggactctctaataattgtcatcctaaatggcatgagatggtatgtcattgtggttttgatttgcatttctctaatgaccagtgatgataatctttttttcatatgtttgttggccacataaatgtcttcttttgagaagtgtctgttcatatctttgcctactttttgatggggttgtttttttcttgtaaatttatttaagtaccttgtagattctggatattagacctttgtcagaggggcagattgcaaaagttttctcccaacctctaggttgcctcttcactctgatgatagtttcttttgctgtgcggaagctctttagtttgattagctcccatttgtcaattttggctttttttgcaattgcttttcatgttttagtcatgaagtctttgcccatgcctatgtcctgaatggtattgcctaggttttcttctagggtttttatggttttgggtttcacatttaagtttttaatccatcttgagttaatttttgtataagatgtgatgaaggggttcagtttctgttttctgcatatggctagccagttttcccagcactatttattaaatagggaatcctttccacattgcttgtttttgtcaggtttgttgaagatcagatggttgtaaatgtgtggtgttacttctgaggtctctgttctgttccgttggtctatatctctgttttggtaccagtaccatgctgttttggttactatagccttgtagtatagtttgaagtcagacagcatgatgccgccagctttgttctttttgcttaggattgtcttggctatacgggctcttttttggttctagatgaaatttaaattatttttttctaattctgccaagaaagtcaatggtaacttgatgggacaggccactgcttttaccatgaatgtaaactgttggtttccaagactgccacagagctggagaagatgggaatagggcaagttaaaatgccacaaagcttgctgttcttactaaatttagccatttttcttgaataaagacatcctggattgctgcaagcctttggttaatatcccagatcctgaaaaagttaattttagccatttttgctatggttctctttgctgttatggagaaagggacttttggaagtcctttctctgccattcccattgacgtactattttttttttaattttgaatctttatgtgaaattttttttaggtgtaccatttgtaaatggctttttaggaattctgcttggagagtctttgtcttttattaggaaaagtaaacttttgaatatattgtgcacacagatatattcaacctatagttttggttctggaatttggcaggcccaaatgaaattctgatactgttacctacaatctctgtgactttgggcaccttatttaaattccctgagtttattttatcatttatgaaaagacaatattaggacattaaccttatgacttcattttacattttctatttattatgtttttttatttttttatttttaaattattttagattaatctttattccacccttccctctaatagtttgaagtttccacttcctatatctgttttagtatatgttactataaacaaacacacagaagtctctacttgagtacataaaattagtttcaagacattatttaagacaagcaataaaactatttaaattgttatgatatactttggtgtctctattttgagaaaaagacttaaggtgataatttctactatttattgagtggatactatgcacaaaacagaataggtacctttcatttgttgattaatcttcacaattctagaaaaaaagagttttgataagtgtcttttgataatgatgacatgaattcatagaattgaaatgagattcccaaagtcacacagattataggtaacaatatcaagattccaattgggtctaccaaatcccaaaactaaagctacactgattctcaaatgcttgtctctttccataagggtaaaaatttaagagcacaattagttgggagggtcatgcatatttgtaataacaaataacagaaagttgtctttcttaccatcttatctgacaaaattttaaatatagaggagaaaaagaaaacataatgatagatgaaagctagaagagtggaaacggctacagaatagcctggaaggaagggacagctgggggaggatgagaaggaagtcagagagacagagaaagtcaacctatgttgactgaagggaacagatgggagatgagcaaagacaaaaggggccatgtgggtaggtgtcatcagttagagggcaagtagctggaatttgatcaatagacaagaatttatttactggacttctgggcattgtgggagatacaaaagaatgtagagttattttgggaacaataatgatgtagagaaaacagatggcttgaactggggcattaatgctgaaggaaaaagctagagacagaaggcagaaagaaagaggttaaggcaatccccatgtgagccagcttgcatatgaatctgaaatttttatgagaatggaaaaaaataagttagagaaaacctcctatttgctattgaatcaaaggtaaaggatttgtagatggaagaaaaaagatgccagataacctccctttccatttctacttttgagaatgttattaaagatttataaaaacatacacatacatacacattacagacaatgcttggcatcatccttccaaatgtaaatatgtccatttagctaaaactgggtagggcctcctggacattactaagattgactaagtaggaccaccttaaaaggatctaggaagtctttttgttttgaagaaagttgcagacaaaacttaaaaggtgcctcagcaaaagaaactatcatcagagggaacagacaacctacagaatgggcaaaatatttgcaaaccacgcatttgaaaaggtctgatatccagcatctacaaggaacttgaacaaatttataagaaaaaacaacaaccccattaaaaagtgggcaaaagacatgaacagacacttctcaaaagatatacatgtggccaataaacatgcaaaaaagctcaacatcactgatcattagataaaatccacaatgagttaccatctcacaccagtcagaatgcctattactaaaaagtcaaaaaacaacagattctggccagattgtggagaaaacaaaacacttttacagtattggtgggagtgtaaattagttcaatgattgtggaagacagtatggtgattcctcaaatacctagaggcagaaatacaatcccaatactgggcatacacccaaaggaatataaaccattctattataaagatacatgcatgcatatattcactgcagcactattcacaacagcaaagacacagaatcaacctaaatgcccatcaatgatagactgaataaagaacatatggtatatatacaccatggaatactatgtagccataaaaagaaatgagatcatgttctttgtagggacatggatgaagctggaagccattagcctcagcaaactaatgcaggaacagaaaatcaaatattacacgttctcacttataagtaggagctggatgatgagaacacatggacacatggcgaggaacaacacatactgggtcctgtcagtgagtgcgggctgggaagagggagagcatcaggaagaatagctaatggatgctgggcttaatacctaggtaaacggataatctgtgcagcaaaccaccatagcacacatttacctatgtaacaaacctacacatcctgcacatgtagccacgaacttaaaagctggaaaaaaaaaaagcctgaggacatttaacaatataatgaagatgaatctccatttcttaaagtcaaggcgaatcaaagttagtttgtgctagcagacatggaacccagttcaaaggcatgaggatgaaattaacttctgggtagtgctctagtatattaaatataatagactctcatatgtgcactcatttattctaaattatctattgaaagcctacaacaacaaaaatattagctactatgagtcttcctagatactaggctcctaaatatttaacgtgatgggaatcccaactacactgatttgatctttataaattatataaatgtactaaattatcacatataccccaaaatgtgtatatttattatataccaattttaaaaattaaatttaaaacatctgaggggaagtggtgagaaggcagtgacatgctccagagaacgctgggcccagtgcatcagaggctctaccagggagacactttgcacataattaccttggctagttatttctctcattcctttgttcatccaatacatatacacatgccaggcagccagagtcttgatagcatcaaaatttcaagagcaatacccacagttattgtggatggcttttgaatggcatggctgatctggaaactgacttcagttgtgacattggtgaggacctcgttagagatttctgaaacaatggtcaagtactaattgaagaatgccagtagtgagtgccttggtgggccccagccagggtatctggggtaagcagggatggacctatgggtacaaattccccaaatttatgcatactgggatagttcaccaagcctcagatggacagaggacagatgcaagttaactgctacctcaagagattggggctatgcagaaggtaacttgtgtctgtccatctgagacaaagcctcactttcttatatacccaacagaagccaacatctaggtggatgtaagtagaaaagtcccaattatatatacccaagaggaattgaacagaccccctaggttacagagagacacttcctcacttgggatagagaagtaaagacttgagtcgaggttcaatcatatatatgtctgtatgtgaatgaatatgtttatatagtaaatggaggttgtcgtttcattcctgccaccaattagctctgtggccatgagtaagctgcttcctttccctgggtttcagctttctcatttaaaacataaaaaaagctgggtctgataatctctaaggtccctaccagctctaatattgtatttggattccagatactgactggagatgataaaatcatatgtcaacttataatttgtggtgtaaaagatataacatcggactttcctcttcttaggaattgtcgtgtgaaaatgacgcaacaaatgcaaaatttacatctctgtcagtcaaaaaaacatagtgctccctcatctcccaacgcagccaaacgcctgtacaggaacctctctgagaaactgaaagggagccactcttccttcgatgaggcctattttaggacaagaactgatcggctgagtctcaggaagacctcggtggtaacaaaactgtttttattcttgtgtcagtttgatttattcatttatgtttgggtttaaggatattctaagatgattcatgtttacttcagaagttgatgcttgcaattttataaatgctggaatagattcaggtagggtagtaactgtacatatttatgttgttagacaaagtctgagtgattgtgagctgtttctctttctttttgtttctttttcttctctcttaatttttatttcaccactacaccaaaaaataaataaacctcaaaaaaaaaagcagcttgacaactatgaagtctcaggttaaatgggctttctgagagttccagtgttcattcaaataatgatattattacttatttctgatgtataccacacattctttccaaaggcattcaaaatagaatccaaagaatgcacatgtattatatgatagacaaagagagaggaggaaggaaggaaagtaagggaaaaatataaaaaaaaacaactaggaaaagaaaatattgggtataagaataaaaatagatatatcaaaaactctaggcaaatatagtacctgtacctgaaatttatcattacattcatctctgacttcccagaaagtcaaagcagaaaaagaaacacaattggttatagcatcccatctgttgataactaaaaatgtctcagtccatcaggaggaatgaatattcacctgttgctcagtcctctggaccttgtagatgtcatagtgagttatgtaatagagaatggcgtaaatagtggaactcatgatgttacaggtattctcatataatagtttctcagaacagccctcagtaaaagctgagagcataatattaacatgctcagcaaggggatttttgcagggagtaatggcaccatttgtttgctcttaaaacagaaatgagtcctagcctttccagatagaagcatgccaaagtttgccaacaaaagcttggaggaggaaatgacttaagagtgagagtaaatacggcacatgagaaattaggaatactaagagccaaaaacaaatacacgactgtggacagggtggcactttaactttgaactcgtttgttttctaatatgttttcgcatttcaaactcatcttttgggaggacttggctgtggttaaatcggggcctaagcatcagaggctcttcagtttagcagattgtggataaaacactttaccattcagcagattgtcttgtagcaaagaaaactgcataccaaaatagctttattccctgggtccccattgtcaaaacaagcatttgcataatagctttgtattttcctcaaatttcaattttgtgttatgtactcagctaaagctgacctgcagcctttgatagggagaattgatttttaatgagactaaaaataaaacctgaccacctgaacatttggtcactggagatcttccacatgttaatcaggtgacccctatgcaggttaaaaccagtggtattccaactcttttaaagaccaagcaactcttggtgaagataccagatagatgtgtaaataatacgtgtgttggtcttctcccatgtgctaagaaatatgtacctaaaagaattccggagttcttctcttttatttactattaatccttggaaagaacttttcaaaggaaccatattttcttaagctatttttttctacaagtgaagtgtattctataaatattcaactctggtcccatgaggcccaaaaccaatttgccatccagccattgaaaccctccctgaacactaccacttggactcctcatctcagggctcagaaactatcaacccacaggagctagcagatatttggaaataaggaagtaacatgtaacatgtatattttaggaagattattcttgtatcagtatagagtgagagctgggggagaccaagactagcagcagacaggtcattgccatggtccagacatgagatgacaatgtagaggctggggatggagagggaggggtgagtttgaggaaaaacagagaaagtgtactctcaattccaagctagccataactgctacctgtgctaacattacctatgccagcatttctcaaactgtattctgtagaacactattccaggagtagtcaaagcaaatgcaataaaatacatgttaaaattattaaagaccctgaggaagcctacagggaagtaatggggtacacttggtttaatctaatgtttatcaaattgatttgaccacatgctattttcttcatagaacatctcttaattactttttttttttttttaagagcgtctctctccgttgtgcaggctggagttcagtggcgcaatctcagctgactgcaacctctgccccctgggcaggaggtgatcctcctgcctcaacctccagagtagctgggattacaggcacccaacaccacactcggctaatttttatattttttgtagagatggggtttcactatgttggctaggctggtttcaaactcctcgcctcaagtgatctgcccaccttggcctcccaaaattctggggttacaggtgtgagccaccatgcccagccaaatgaactattagagtatttttcagaagactggtttgagaaaagctgaggtttgctcttatctacagcccagccaggctatcctgtattctctcagtgcacttattcaatgtccattagaaatgacggaggggaagcctaacagagtgtttactttggagaccttgggataaattgtagttattccacttataagtggacatgcagtccctgaaacagtctttaaacttcaaaagagctaagctacaaagacacactggtttaagaaattgtgctgatctacttttgctcctctctagaatttccagggcaatgaagccatgtttgaggcagtcgaacagcaggacatggatgctgtgcagatcctcctgtatcagtacacaccagaagaacttgacctcaacacacctaacagcgagggcttgacacccctggatattgccatcatgaccaacaatgtgcccattgcaaggattcttctgaggacaggggcccgagaaagtccacactgtaagtaacctgagaataaacacatgtactattaaagccagattccagccttatgccaccaaaatagccattgctgactttcagagcaggaatggttgactaagcatagactctgataggctttggatgttttcatgggctttcatgcaaatagtgacagcatttattggtctaagcatcaagttcctttctaaatagaatatgccgaatggcattaaaaaggaacccccaaagaacttctaagaattttattgcaagctttaaaatatgtgagatactccaagtgaggatatagaataggagatatatatagaagaatgagcatttgcgtgtttctgttttgtatccacagtcaatgcggtggcttcattcattcattcattcattcattcaataaacactgagtgtgggacactgttctaggtgctaggaatgtaacagtgaacaagacaaaagtccctattctcatagaaattacatgcttgttgggaatacttccaataagcaagtaaatagataaaatacaaactcaaaatagtgataaacgctgtgaagaaaataaaatggatgagtggctgtagattgatagggaagggactattttaaatagggttgatacccattgaccaatctctcacaatccccacccctcagtcttcggtaaacactgtaatttctgcttctatgatatcaactttttaaaaaaattccacatgtaagtgagatcacgccatgtttatctttctttgcttggcttatacaacattttctttatctattcatctattgacagacacttaagttgattctacaccttagctattgtgaatagtgccataataaacatggggaagcatatatttcttcaacatactgattttatttcccttggatatatacccagtagtgggattgctgcatcatatggtagttctatttttaattttgacaattaggtaggaggaatgtctggtgtttactgtacagtagggtgatgttggaatggttaacagttaggtattgtatattacaaagtagctagaagagaggcttttgaatgttctcaccacaaagaaatgataaatgcatgaggttatggatacactaaataccctaatttaatgattatacaacatatatgtatatgaaaacatccagttgtaccccataaatatgggcagttacaatatgtcaattaaaaaatgaatacataaatagggttgggcaagaaaagcctctctgatgtggtgatatttgagttgaattctagaagatatgaaggaatgaactatgagaagatgtgggggtcaaattctcggcagagtgaatggcaaatagaaagatgctgaggcaggcatgaataagactgacatactggaggaacaaaaaaagtcagtgggtccaaagcaaagtagcaagagggagaatgatgattgagagagaagtcacagggaccagattatgcaggaccctgagaccatggtcagtgttcaactttaattgtggagtacgatgggaaggcagtggagcaatttaggaaggtaaatgacatattctgatttacattagaagatcaccacagtgctctatggaaaagagacagtggtgaggtaattgtgaaattgagaagaccagttacaaggtcattttagtggtgcaggagacagactggatgcttggactaacatcacagtgatgttgagtagtgtcagaattctggatatatttttaacagctttattgagatacaattcacataccataaaatttacccttttgaagtatacaattcagtggtttttaacatatgcacagagttgtgcagccatcaccaccatcaattttagagcttcattgccctgaaaagaaacatcataccattgactattatcactccccaatctccccaactcttctcagctcttgacaaccatgaacctaccttctgtttctatagatttgcctgttctagacatttcatgtaacagaattatataatatatggtcttctgtgactggcttctttctggatgtgttttgaagtagagctgatagtacttggggaagaaagttgcactggggctaatggcagaccccacccaggagtgggtgggataatatcatgcagcactcaccctgtgccaggcacttttctgagcactttccatgtattgactcctttaatcctcacagcaacattatgaagtaggcactcacattccccttagtgaaaactctctgacccattgaccacaatggctgtgagccactgtttttatgtttcctaaaagaaaaaagtaaactcatcaaactgttagtttcactaatactgattcacttacttccaagtggtgagacccagaaggctgaaagagaagcaagcaaatatataattagaggtcacatctctgctcctaaatttcgtaaatcgccaccacccaaagactaggtacagaagcagatccttgtatcagaaaatttcttactataaaaatgctaagcttaccatatccatgtcagagacagtgaagatttggattcagtaggatttgagctcttcaaaagagctctatagtcaaagtgctgcccctttttagtggaactggaggatttggaaggatgataaatgaggatggaagaaattgaaatggcatctttgctgccttccggtttattctgcaacaacgtctgtcccaaagatccagtgacagaagggtggagagagaatcagagggtctgaacatggagaatgcagactgagccccattctacaggaacaaggagaccattcatccagatgttgccatggccatcctgcactgggctggatgaaacattagtcctactcacttacctgcgacactacaaaaaactctgcattttctgtgaaaacagtaagactccctacctcccaaagccccctgtgcataattaaacctctgtaaaagaactcaagtactaaatatctagttaaaccaaaagcaaatttgttcaagagatccctggttttcctcctcattctctctgggatgatagccatgttaccatcacaaagttgtaaaggacaaatggtgggagataaacccaggtttcagcctccaggaaacatgacacctaagtcaccttggctacctaagaaggcaaagagatacgaccacatatagacttacatgtgtaaaaatggcaatgcaatattggttgtgtacctatgaagtctccacatacaacatctctggttttcacactaaccctacaggataaagttattaactccattttaagaggaggaacttgtgattctgagaagttaactgactggcccaaggtcacacatccaggaaatgaataaggatgccagggactcaggcccggatctgtaggatgccaacacctggaatctttccacacaaactcactgcctttccacataaccaatatggagggccgtggcctctgggcccctgcatctctccctttctactgtttgctaaagtcatatgatgtatttctttgttctgttctgcgcactaaggtgtcagtcgtgttggagagaggcaggatagaaaaacatagtgttttcaggcatttttaattcactttatatatcaagtacaaaagaagcagaatgcttctgtacgtgagtttgagcaggcccaagaggaaaaccagtctgccagccagaaccagataagcaaacacctgccgtaaactgttccccagaagctaaagaggcaggatatataagagaggaaaattaatgatgaggtctgaagttcttagagtgttttacacctacaaaaatggttttgtctacatcatctcccttgatcctcacaactggcttgtgagggagacgttgttttcttcatctttatcaataaagaaatcggaattttaaaggtcaaatagttatcccaacacaacaaagttaataggtggtgcagtcaggatttgaacccagatctgtattaattgccttggtgtttgtgagaaagctttggcatgctcactgttacacattagatgctcaattcctccctattttggctctccatctgctcctcttctaatgacagttacatatttcaaagcagagtgcagactccagggtttctaacaaggttaattttctttcctctctttctctgtgtattctcttctgaaaactagctcagtattcttttcactatgccaaccaagtatcctcacacaattcagaagaacatcctctgtagttttctccatttcttaacaggaatcaccgtgacacacagggtttagggacttaactaactcccaaaccattggtcaggcctgtcttctatcttgaacccctcgatgccagagccacatggatgtgttctttataggcatagcttgaaactcaaccatctgtgtttccttactcatagaaaaatcccagaagcagccatctaaacttgtacactgctctcaagttaaatatatacagaaccccagcctactcattagacgaatctactatctttattcaatgacttttttctgttcctcctacctttttgcaaacagcacaaaataatattctttccttgcagaaaaacaatcagccattattgaagtagagtcccaagtactttcttgcagactgatgtgctgagcttaggaaaacaaccactgaatctgaaaggactgcaactaggaaagccaatgtatagaggcaccacaggacacccatgggtatgccatggactgtttcatacacttaggatcccagtcgctatgactcatgttcaattgaacaactgctatcaaagaaagacttgttgtctctgtatataaaagcccccagtcataaacccctccctttttctgactaactcgtattctgcccccaccctcaaaccaacagcctccaggaggagtttgctgaatcatcgatgggagtcttgcctttctgagatggccattaagaccccatagatagtaatcataaagaaaccagctcttttgcctattgtgtacaaatctggtcactcacagagattttatttcattctttgactccagtacctagtacatagtagatgctcagaaaattacagttgaaattttagcctttgtgacagccttgtcttatgctactgggagtcacagatgtcaagtcttagtgtgcacatacacagtcactatgtgtatcatcgacacagacacacacacatgcatacacagaatgtagggaaaaaaaccttcaagtcttctagtaacttaaactttggggcaccttttgttgttaataatgctgttattgttttccagacattgttacagaatttggttgtagatgtagcctagttgtttttatttttacactatttaattacacagaccagtaagaatggtggaatacctctctgtttcagtctttctgccctttcccttagctacattctccttctctctagtccctctcctctccctctgcatttcttggtgaatgcctccctctaactttctctcagatgctgcctgtggaactagaaagtgtcactcagaatttgttatgtccagttacttcataaaatgcaattacagaattgctgtcatttgagtatggtgcagacaccagtgttacaattttggcagtcttgtcaggatgcaccactcatttctgcagtagtaaggggttcgtgtttgtgctgggactggtcagggcatgtctaagaggtgtgactataaactaatgaggctggttttatgtaaacaaacacactagaaagtctacaatccaagcgaatgttacccttccacatggtcctcctgggagaccccacacttgctccaacagtgctgccattgctctgaacactttggaattgtcctcagagtcagtttatgagaaaatctgactcgttgctgagagtcacacctgatttttgttccaaaacagcattgcctagcgtcatcaccctctgtgttcaccagacttggcttcaaattatttagagagatttcctgaaatcaaatccaccctcaaaggacaaagatttgcagccaataagaatatgtaaagaacaagccttagacaggtctctataatgagccctcaatatttttttctgcttcactaaaataggggtatagatcttcaccctaacttacaaatctgttcttatactgtgcactcctcacccacaccaccctccattctgttcctgtaacatgccaggctatcttaccatagggcctttgtactggctattccatctacttggaatgctcgagtgcttttaatcttgttcattacatggccaaatccttcttaacattcacatttcagcttaaatgtgacatcttcaagagaggctttctctggccaccaagtccaaagtctaaaatgacattttctcatcacatcactctcttgtcattttgtgcatagcactgacaatttttctcaatgtttttatttgcttattttcatctcctctgcaatagaacataaattccaaaggacagcacctctctcatttattactgagtccccagcaaacagtagacactcaactgaatttaattgaatcaatcccaagcctatttcttttgaggggtgtcaatatattatcccttatgaaaagaatgattttagttagtattgggctcattgatcttttttatgttttcaaataattatttaaacatcagatggccaaaacctaagttcatgtcacctattctttgagttgatagttgcatttttctggttttttgctttaaaatatttaattgacaagactgtatatattcaaggtatataatgtgatgacttgatatatgtgttgtgtaaagattatcataatcaaactaattcacagatccatcacaacccatgctccacattagatccccagatcttgttcatcttctagttgaaaatttgtaccctttgatcaatatctccctattttccccacccctagcccatagcaaccactattctactctctgtttctgtgtgtttgactttttaaatttccagatttaagtgagatcatccattatctctttctgtgtgtggctttttttacttagaataacgtcctccaggttcatccatgttgttttatagccatcttttttttctttttaaaaaaattttaaatatacatgcaacatagaatatcttctccttgtcagaaatgaaaagattatagataaagttaaaaggtatctttgatagcccacccaactaatccccacgtgcacacacaatctaggttcccatcccccaaaacccaaaatatatccattgttatcagtttagagggtatgcagacttttccccatgagttttaacataaacataaaaacaatagaattgtttggggagcagcttttaaattaaacccttagaaaaggctaaaaattaaatttctggagtcagagagctctggcttcaaatcccacatctgacctttggtagctgtgggaaaattccttaccctctctgtggccccatttcttcatttgtaaaatggatataataattgtacttaacttgtattattatatattgctgtgtaataattacccccaaacagcaactaaaaatagtaaatgtttgtctcatgtgagtctgagttgggaatggctttagctggttggttatggctcagtcataatctcatgtgactccatgagattgctgtcattttaaggcttgattgagctagaggaccccacttccgagcttactcatagtggctactggcatgagccccacatttcttgctatatgggtctctccatatggctactctatgacatggcagttggcttcccccagagaaaatgatctgagaaagagagaaagagagaccagccaaggtggaagcaacagtgacatgtataacctaatctcagaagtgacatagtgtcatttctgcagaattctgctgatctcacagaacaaccctggttgttcagtgtaggagaatactatacaagggtgtgaatgcaagcagacataggtcactgcaggccctcctggaggctggctaccttattacccatataagattattgagaattaagtggaataataccattaaaacatttatcacattacctggccaattgtaattgatttctaaaaattgttagccaacataactctcaaaaacaaaataaaatgacccaagagtttctggtaaagaatttaaatattttacccattagttatatagtttgtattccaaaacacttcctatgaagcactttttaaaatttgtataatttttatgttctaaaactacactgtccaacacagaatccactagccacatatgactatcaaacatttgaaatatatcgatgccattgaccaatggaacagaatagagagcccagaaatgaaaccatgaatggacggtaaactgcttttcaacaaagttaccaaaaacatacaatggaaagagaatagtctcttcaatatacggtgttgggaaaactgtatatccacatgcagaagaatgaaactggacccttatctcataccatatacgaaaaccaactcaaaatggagtaaagacataaacataaaaccagaaactgtaaaactactagaagaaaatataggggagaaactacatgacattcgtccaggcaatgatcttttgcatataagcccaaaaacacagatagcaaaagcaaaagtaggcaaatgggagtaaaacaaactaagaagctttttcacagcaaaggaaacaacagtgttaagagacaacctgtgtattgggagaaaatatttgcaacccgtacatccaataaggggttaatgtccaaaaaatgtaaggaattcaattcaacaggaacaaaataaataaatcaatttaaaaataggtggccaggtgcagtggctcatgcctgtaatcccagcactttgggaggccaaggcgggaggatcatgaggtcaggagaccgagaccatcctggccaacatggtgaaactccatctctactaaaaatacaaaaatttgctgagcatggtggcaggtgcctgtaatcccagctactgtaatcccagctactcgggaggctgaggcaggagaatcgcttgaacacgggaggcacaggttgcaatgggccgagatcgcaccacagcactccagcctggggacagagggagactccatctcaaaaataaaaataaaaataaaaataagcaaggaacctgaatagggtttcttaaaagaagacatacaaatgaccaacagatatatggaaaaaaaatgatcagcacctctaatcttcaggaaaatgcaaattaagatcacaatgagaaatgagatatcatctaacacctgtcagactggctattatcaaaaagatggaagataagtgtcggtgaggatgtggagaaaaggaaacgcttgtacactgttagtggggatgtaaattagcacagccattatgaaaactaagtggagtttcctcgaaaaactaaacacagaattaccatatgacctagtcatcctacttctgggtatttacccaaaaggtttgaaatcagtttgtcaaagagatgtctgcacttccatgttcactgcagcactattcacaatagctaagttatgaaattaacctaagtatcaattaacagatgagtggatttttaaaatgttatatattatatatatacataattgaatactattcagcctttaaaaaggaaggaaatgtcatttgtgacaaaatcgatggaattggagaacattctgctaaatgaaataagccatgcacagaaagacaaatgtctcatgttctcacttatttagagtcttgtggactctaaaacgattgaactcatagaagcagaaagtggaatggtggttacagagtcagggggttggggacaatggggagatgacagtcaaagtgtacaaaatctcagacaggagaaataattggttttattaaatttattgcactgtgtcatgaagatagttaataacagtgtattgtacatttcaaaattggtaaaagagtaaattccaaatgttctcaccacaaaaaaaagatatatatttgaggtgatgaatatgtctagttagcttgatttaattattccacattgtattcacaaatcataatattactttgtatcccataaatacatgacattattatcaatttataataaaataaaatttaaaaaagaaatgtgtctagtgcaaatgaataagtgttctaagtgtaaaattacattgatttcaaagtcttagtaccaaaaataacataaaatataaaattaataaattgtatattgattgcatgatgaaatggtagcattttggatatatcaagttaagtaaaatatattattaaaattaatgcaacctatttctttttgctttcttattgtcattactaggaaattttaaatgatgtggctcacactatatgtctatgaacagcactgaaaatattggcagaaaacatggttatcttgtttcattacttaaacctcttatgatgccatggggcaatttcctttgaattttctaaataatccactcaagtggcttgcatgttgtgcttttagagaagatgtccattttcccctttgagtttgatgagttccaaaagttcctttctgtgtcatttgttctggcttcttaagaaatcaccagttacaatctaagttatataaggactttgtgagtcaacatcctcctggaaagttgcagagaacacttcagagccccatgtctgggtgtaataagttataggagaagaaagtttcacagtcattaaaatgaaacatttaatctccagatctctaaaacctttttggaaccacatctcaatgtccttgggaaaatctgaaaatgtaataacagcttgagacctaagtgaagccaaaatgagtcttgcgtcctgaatcttaagatggataaattggaactatgttttgtgtttctctggtataagagtttttgaattaaaagtatttaatttttagaattcccctacattactttgccattcctaccttaaaacaagtcagtagtgaagttgttagaaggttgtcgcttataatcagcaaaaataaattttattaactgcccagagtatatttgttacaatgcaacgttcaaatctaagtgaccttgttttctgccttgaaatagcagatggggttgaaattgatatcacttgctagtgtatatttctgaacagtagctaggatggaaaaattttatttgaggcaagaggggtttttgatggaagaacatagagttattttataaaacaagtattttgatttattttgtgtgcttctaaaagtataagatcaatggatgtaataataataagcaaccctccactgagagtcttctatgtaaagattatcattaatttgttacaagttataagacaagtgttgttacaatgccagttttacaaatgagaaatttgggctcaatatagcagagtaactagttaggatcacccatatgtaagggcagcgcttgagctatagaaccccaaagcccttttaccacgttgcttgcagtttggaagtacaatcacatgcacataacatttcagtcaatggtaagctatgtatatgaaggtggtcccataaaattataaggcagctaaaaaattcctattgcttaatgatgtagctgtcataacatcacagtgcaatgcattattcacatgttcattgtgatgctggtttaaacaaacctactgtgctgccagtcatataaaagtatggcacatacagttatgtacaggacacactacttgataatgacactaaactactatgttactgtttcatgtatttactatacttgttatcattattttagactgcactccttctaattatttaaaaaataatggttaactgtaaaccagcctcaggtccttcaggaggtactctagaagaaggcattgttaccataaaagatgacagctctatgcgtgttactgccccttaagaacttccagtgggataagatgttgaggtggaagatgatgatgttgataatgttgaccctaggcataggcgtaggctagtgtgtgtgtttgtgtcttgatttttaacaaaaacagtttaaaattttttttaattttttaaaagcttataggataaggatataaagaaaatatttttgtacagtggtactgtttgtttgtgttttcagctgttattacaaaagacccaaaaagttttaaaaagtttatcaagcaaaagagttacaaaatgtgtggctctagggaaagcagaaaaattgtcagaaggagccaaccatagctcaagagaagctgtccatctatgctaatttattattgataaagaattttttatacatttagtgtagcttaattgtacagtgtttatgaagtctgcagcagtgtcagtaatgtcctacgtcctcacattcactcaccactcactcactgattcacccaaagcaacctccagtcctgtaagcgccattcagggtaaatgccctatacagctctaccatgttttatcctttatgccatacttttagtatttttagtgtacttttttccatgttgtaatagatttagatatacaaatactatcgtgttatagctgcctacagtagtcagtacagcaacatgctgtacaggtgtataacctagaagcaataggctataccatagagtctggctgtgtggtaggctatgcctgctagatttgtgtaagtatactctgtaatatttgcacaacaatgaaattgcctaaggatgcatttctcagaacatatccctgttagtaagtgacacatgactgtaattggaaagcagatttcagttcaggataaggaaactttaaaattcggagttgtatgaaaatggacaaggtcatctcagtgagttcccctcatgtaggaaattacacaggaccaagggtactaaaggggaggtaactgaggttggttgtaaggtatccttctaactctgagattaaatgattgtcttagtgcctcattttctcatcattgaaaaacaggaacatacccataataacagaaaagctgttactaaattgaaaaatggcacatcattagtaatagacaaatgtgtccgtctttttcaagcaaaccaaacaaattgttccctaaaattcttaattaaaaattaaaattagtttacatgttacactcattgtattttcaagctttgagcaattatcagccaggcccaaatttagcaattgcaggcaagggcaaagttaagaaactgtaagtagcaatccataggttagattctaatggtgaagaaaatcccttcagtccctgatcattgtttatctcgggatttaaacagtaactctaattgtattctttgaacacaaattcctgccccatcccccaccccatcccttggttaattagctgcataggtcttataacaaatgcccactcagaagcactgggaggtagaaatgctgttgataattaaacaccacaatagcacagagcctgtttcaggagccactgagtggtcttgcccctgctggactgcttaccacacagtcacagaccctccattgtgctggtatggctgctcagagggatagctgcttggctggagaaggaaccaactgcaatgagagaaaagaccaaaccttgcagagatcaggagtatggcctccagggaaaagtgtcctgtgggtggaagtgaaaggggaatgaatccaagaaaaagagaagtggatgggcaggaatgataaaacagacatagcctttctattttctaaatcaaaccaaccagccaaactgagttcaccaatttcataccaaatagataacaatcaggaaattgtaatatataaataataggttgatttgtattctatttggtttagagaaaatccaccgagttctttaaggtttagatgaagatcatgaataagtcatcccatctccctgggtctcaatttcttcatctttaaaataaggaagttgaaaatagccccattctgccatcagatccagaggctagtagttacacttctgtaacaccagatgttagtgacaatgagcctgatcactataaatattctgacaccactgactgatccagagaatgaaccttttgatgaagatcagcatacacaaattacaaaagtctgaaatttttttatcaagaggtataaaacaccatgaaaacaaacttgaataaactgaaaatgaactttttttttttttttttttttgagaaggagtctcgctccgtctcccaggctggagtgcagtggtgcgatcttggctcactgcaacctccgcctcccaggttcaagcaattctcctgcctcagcctcccgtgtagctgggactacaggtgccggtcaccacgcaaggctaatttttgtatttttagtagagacagggtttcaccatattggtcaggctggtctcaaactcccaacctcaggtgatccacctgcctcagcctcccaaagtgttgggattacaggtgtgagccaccgcgcccggctgaaaatggacctttttttttaatggcaataggacattgtgtcagattaccagttatagcaacaattctcttttcctgaccaatcttgttttaccctatacatccacagggttttgacacttgttgtccagttgaaaaaaggttgtgtagctgtgtcatgtatataccttgttgtgtcaaaaggacatttaaaattcaattaggattaataaaggtggcactttcccattttattccagtttcataaaaagtggagacagactgaggtgtatacataagaattttttccttttgtgttctgtcgccaactgaagtggctaaagagctttgtgatatactggttcacatcctacccctttgcacttgtggcaacagataagtttgcagttggctaagagaagttcctgaagggttttgctgcattctaatgcatgtattcgggttaggggaatggaaggaatgctcagaaaggaaatacatttattctagactctggaccatacaccatctccagctatttacgcacacctttctttagcatgctacagttattaatctggacattcaaggaattggccactgtcactgcttgttgtttgcacattttttttaaagcacattggtgctagagaaggcagctaaaggaagtgaatctgtattggggtacaggaatgaaccttctgcaacatcttaagatccacaaatgaagggatataaaaataatgtcatagataagaagcacagcatcaatgatttcaccatataaatgtggaggctatcaacaaagaatgggcttgaaacattataaaaattgaaaatgatttattaaatatgatttctcaattgtaaaaaaaaaatgcccccattccagggtggcaaaaatagaaattggattcccagaacaattttcaagctttcaaaaaggctaactatcacaccattactcaagataaactacacagtctaatataattgtcatatttacttgcttctgcttaaaatatattaacccagtttgttaggttgattatctcattctgaacagatgcttctattgatggttatataggtcattaataatagggagaaacatgatcactttataagtcagctggtttagtagacaaaaaaaatctttcaaaagagggtgttttattaagctattaaaaaaatccactggaaaaaataaataaaagtttgcttgccgaaatggttggaaaccagtggctcagtcagtgcttctctgacttgtccatgcaattacttttaacaacagatgcaaatgatagtctcaaggacacctgtgttcttaacctggaaaaaagggatagagttttacaaagtttcccttttttcaaaatcttcaatttttgaaaacactttccattcttctccataatagacctatttaatttctaaataatatgcttaatcaaaatctgcatgtaaaatttgatgctccaagaagacacattcattcatattgtgtttttagaggtgatcattgcaccccctacttcacccaccgtcaccactatattacattagagtttagatatcccagtttgaggtgcgctgggatgtaaataatcttgcagagctcacccagctataaaattctgtctttagtctctgaagaggcaaaatgcattatcttgaagaggtggaattcctttatcattataactcaaattgcatctaaagcctagaaggaaagggaaaatgcagaaacaaaatgtgtggttctagggaaagcagaaaaattgtcagaaggagccaagcatagttcaagagaagctgtccatctgaaatgccacctggaattcacaccagtaataactgttgtggatataaaaattaatagtggggatttcatagtattagaaaaatttatttttataaatcatgtgtctgtcacccaagtgttgacgcatgcatgcaattcaaacatcaggcatacaataaaaagctcactggataacttaacaaggacaattcccccattttctctataatttggagtggaagaaggaggggggagtgggtagagagtgcagttactgggtcaattaatcaacctgaaaactgtgacacaaactctgacgcctaacctatgtctaaaaatacacaaatgtatacgaatttgttttaaactgtcaatgcctatatttaggaccttcccagcaaggctataatgagactgtgtttgagggcttcagtcatagcagactctaccattaatctgaagttagttaaattaacagcatttagtactgacttgtcaatctcactgctccaggaaattgcaccttgaggctactaatattgccaatttttccactggagtgtgcgcccgcgtgtgtgtatgtgttttttttttctccagaacctctgcgttcataccccatcattgcttccctacgtccacagcacttatattatcatttattctggcctcctttagccttccccagggattctgcatagtgtagctgctcagtgaaagagttttttagctttatatttatttgtttatttttctgtcatggctcatgactgaggcttttaaaaaaaagtgtgacagtatttagagtacatgattgactgctacagcaacattcattaaccatgacaaatctgcagcaaaacacagtcctgagtgttctaaacagcaactttaaaaagaaagaagaaagaaagaaaaagaaaaaagactcaactaatttttcattgacctcgtctgtaaataaatttagaccgatggtgcacagaggcaataataaattagtattcatttcctgtaattaatgcaaacatgcccatgaacacagagaatatgaatatataaccacctaatttccatttcaaaatacacctaacaaattttcacttgagttatcttcacaatattttcccctttaattagaagaatgaaatagttggatttctttcccacccaccagggagaaatattgttttggtcacagggagtgtcaaacacatttcagcaacagatctgtaggactttagtctggtttacttgactgttctgtgatcccctaccatattcccatgctgaggctcttttatcacttaaccaggtggggctctgaagtgaccaagtgaccatcgtggcaggccctcatatgcataacagccatgaggagatcataagaggcagcctcactgctcagcacaagaaagggagacatacattccttcccattcattgacatgaacgcaagagcaggatggctaaacaatctgatgtaaatcaaatgaagactatcacatattgggtaaaatagaaatagcaagctctacaacctctctcagcaagaggggcttatataacttatcctcttgagcataggtatctctggagatcattcctaccattacaccacaatcaaagatcaatttctgatcacattcaagtcagccagtcatcagaactcactagctcaactgtggcagcagtagcggaactctttgtaagcaataaatacattgattaacaataataaaattatgcctctaagatgtacgtacaaaaatgtctataagctgggaagaatgtgttaaaggcagaaaatttgaatcaggttctaccaaaagcaaaacaaaacttcatcagaatgcaacttgcctcatggataacatttcctagggtcttcctggccatacggagttttgcccctacatgtttgtccttctagaggtcatggcaacaaatgtgtactctctggatgagaagtggtcctcctgggtacttgatggtggaattctaattagctaagttaagcagctaagtgaggtatgtgttacagcagggctggagagcaatgggaatatattaatgtgatgaatttaccacttaatctgattgtaagtgtcactaattagaccttatcatagtaagatacttgataacaaacacagatcccacttttcccaggcattttttttttttttttcaaatcatagtaaactctgggatatatccttccaatgaagcagcatttccccagaaagaaagagaagtaatcccatttctttccctttagttgtcagcctggaaagccgagcaatgcacctcaacacactggtccaggaagcccaggagagggtgagtgaactgtctgcccaggtggagaatgaaggattcactctggacaacacagagaaagagaagcagctgaaagcttgggagtggaggtatcggctctacagacgcatgaaaacaggctttgagcatgccagtgagtataagcagaaaatgtctacatttcactagactgagcctcagtttgagacagccaggtcttcttttacagattttttttttcagctctacagagtcatggatggccgttgtcagcctgtatggagcaagggctctgagaggctgtcaaagggtcttttatcttgcttgagtttctggctcctgatgggtgctctgaccacagccatgaggcttcatgcctctggcctctctccaccatgtcacactcatctagcactttccatccgctacgccctaatgcctaatgatctggatggtctgatgccctagatggctatattttgggatagggaggtggaaaaatatttgtttgcctgtttgtccagtttctgctccaagctcaagtttaagttgttttcaacgctctactgcatttttttatatagagctataaactgaacttcagttaacacaggcaaccgaaaagaacaatcaactcaagaattacgcttttgtctgcactttcattttctttaccaattctttttgttagtttaagaaaagccttctttttggataatactcattagcactggaaagtaatgctgagtgtagctcctgatacaaaaacaaaatataaaattcaaacacttgtgaaatattaaactctcattctagaaggagatcgtaactaaacaacaacaaaaaaattaggctggaaattttaaatataagggaaagttcgttagtttgaaaggtctctgcctctgctgcaggaaacttagttgtgatgtagacaaagaccaaagacagtgatgatgttttcttaagtacactaaataccaaatctaggcctaatcctttctcttggagcaaataacttagcaacattaatgaaagtttgctttcaacatcaacactctccagcaaggctggtgcatgggtttgtttaaagagattcagcgcttgctttaataaatgcatttgctattatgcctcatttaggacagattaacactagaaacagacatattttcagatttgatgtcaatttttgtaatttgctaaattataaaacaccttctacgtgttaagcaatactaaaagccatcaggagtcctttaaaacctgaggttagtggacatgacatccacccataaatttttttctcggaaaatactgctcatttgtaataggagaaagcctgagagcaaggtgagttagaattctatcaatactggaaagagcccaaaagtaggcaactgaagccaggggctttcatcctgactgtttgtcttcactgtgttcttgaacaaggaatttggccacttggggctgcggtttcctcataccaaaagtgagtgtgctatttcttgccctttctaccaaggagggctgcaaaaagcctccagtgaaacgatgtactttataaaacgtaagggtgtccactgacaatataggatcctgctatcacttcctgcctttctcttcactgatccagcccaatctcctatcgtgtttgcaggatactttaggaaggcttaactggtattatttaccttttcagaaaatgttctaatgctcaaataagaccccaatggcaacaaataaaagccattgagacgtctaatgaaaatgttcaaaagcgaaagctattaggctccacaaacaaatgtttccatagtattcatttcagggtatcctttgaagagggaggaacgttgtttgaaaaggatttgctatgttaagatccttgtgtttttccttctgtcccaggagcccctgagatgccaaccaatgtctgtctcatggtaaccagcagcacatcactcactgtcagcttccaagagcctcttagcgtcaatgcagctgtagtaaccaggtataaaggtactggacccaagacatgttttcatcactccttcttaaaaaagcatctgctgtttgagaatcaatagtgcattttgtgtgtttgtttttcctactgataggaatgtttttatcccattgacttttgaagttgaaatatttccataggcactcatgtaaaggaacaatcaagtgactgagaatgtcacagaaaggaagaaccacaagaccaggctgtcatttcaagtccctcaattactgtttcattcatctttgcagaggacttgctctatgcatagcacagggctggggacaggcctgagtaggaaacactgaagaatcagacttgatccaaggatctgaggggttgtgatatggaacatactaagtaggggttaaaaaaaacaataactaaagctaggtaacagggttggggtttttcaaaaatgcagataaagtatattggaggtcaggaaagagcaaggggaagataaaatggtgggatcagtaagggttccctagggtggaggtggcattcaggcctggctatgaaggataagtaggctttggcctggaagatattggggggaaagtaaattccaaatggaaaggacagtcaacacaggtataaaaccaagaacataccaggacaggtagagcaaactaagggaacaagtagagggaatagaaaatagcatggctccgaaaaagcatagggtcgtgagaaggtacagtaagatgttaagattaaagaatgaaactatgatcaacagaaaaggacagaatgaggctcgaaattaaggctagggagtttagactttatgtgatgaattcagcagagccattgaataaggtagggacaggatcagaggtagacttttgaaagattggagtggtgatactgtgtatgatttattgagagaaatagagatttagaagaaggaaatgaattatgaacctattcaagagggaggtcatgatagcctgacctggctacaatggcagcattgggaaaagaaagggaaagcccaaaggaaaaatgtactgcagaggtattgtgatgacaacagctaatgcttacgtagcaccgactatgcaccaggcaccatttaaagccgtttaaagttttaactctatttaatcctcacaatgatctcatgagacaggtattgttatgattccaactttgcagatggaaaaacagaggcaatgagaagttaaggaatttgcctaaatgcttacaacagagacagaatcatcacattatgctgactcttgaatacgaggaacaaaaaaggaaagctattttctggattcacaaggacatatggaattacactgaacagccctaaaagctgataaagctctccacacatattccaaggttccaggctacagtgtggactttctttgcattcaggtcactatggctctctctgcccacaaacatgttcaagtagtgcacatgccttcctttctcattctcaggcctgtccctctggggaacttcatatgtctctgcaaactttactctgcccacaccctgtagctttcttgggtacttagaattttccagataacgccactgtgtttgtaataccttagataagacagcattgaattgattatccctggattttctgtatcagtctaagagaaagcagccttagggtactaaggacagcagataaatgaaaccacccaggatggccccccacagccatcctttgaaacaactctgataccttttcttggttgtctcatctgccaagactgaaattcagagcaagcatttctgggcaatgttagatatggacgttttctttctttctgcctctctccagctcaggatttcgatgaagagtttcatcagtgctgcccaccttgacatttccttcttactttgatgagtgagctatcaggaaccaaccagtccagactgtcagcaatttaatacttgcccacaatgccggcaaattctatccgcattcacatattaacacttctcatctcaggagacttgcatttgggtgaggttgaaatgaaaggtcacaagtgggttctgttagagactggaggggattaattaagcattataaatagaattgtctgttgcattatggagtaggtttccttgtgttaatttataaggtcataaattgagtccttaacctgaccgttctcaagggttatttaaaacagctggcagcctactgtatccgcaggaacagcagtgcagtttttaattcaggggttgaagtaattatttaattatgaaaatattagtgtaattattttgtttgcaaaaaagaaagaaagaaaagaaaaagaagaaacaattgagaaatctacagaatgaaatggcaattatctaattggttagagggaaagtttacccctgcagcatttagggtttggcaaaaacatctcagactattctccagaatttctgggttcagcaaaacctcaagcctattttgacaactcaatgttttcctccttcatgcttaagctagggtgtatttcaaaggaaatctaaatccttctgtttctcatttgtttacactcaacccatcaacatattgttttataagagtttgttgatatgttgacatctttttaagagcatcactttttaagttttcttcacaccgtgggggcacgcaccaggccaactgccatcacaactcggagattaaaggcatcaatttccacatcaaacctaggaaacagttttcagtgagacccacatgattttttctgaatttcccctgaatgcagtaaaacggggctaggagatctactctctgtttctaggtgttttctctctggattcaaaggaggcttgcatcttttagtctcatctcacccatttttatggctgacagaggaaaacctacagttatttcagatgcttcgatgctttggacaattgccagaagtttgtaccacattttctcctcactgccttgggtcacctgcctgaacctctcatttgcagattatgtcatttctctgcaggcctgagacagaaaacatttgcaaaagtgattttactgctccttgcagggttgggggatggttaggaaggcatcctgaaagaggtgcagtacaaaacctcttttccatccacaagatgaaacattttcgagtttgtgttttttttcttaattgggcctcgaagtggccacaccttggggtttgctaattacaacatgctgcagtagttgctgcattgcctgagtgcagtacccgggttctgggtggtatccttgcccgtgtcttttcctacttcattccctaacagattagaaaccaccaccctagttcctccctacaaagatttgtaatagcaaattgtttaactgctcgtcatttgatgacattttttaaaattaaaaagcatctctccttgcagaaactgacagggcctttcaggagctcatagtgtatctgcttctgcagtgaccaggcccatatctctgccgaccatcaccttcagtttctttctcaggagaagcagccaaaaaattccagggcggtgtatgaggggacatttcagcttctaagaaggagagtctaccattgggacattaaaaccctcagggtcgatcatttataataataatagtgtgaacttgatcataacctgatgacttggactatcttttctacaagaatggagaaaaccctgacatcacagagcacaggttcccattgctctgtgatttatattcttcttaccctttctgttttttcctcctacaccttgtagttgggtggatatttatctatcaagaaaaatgcattccattaaagaatataattatttatatgtttaattaattgaaggactaatctggtcataggtatgaggtagctaccttcattactaggttgaagtgatacaattccacaaagcaaaagtatttataactttctttagcctgtttggggaaagagaggtggggaggaggccaaagatttgcagatgagagcaacgaggaggagcaggaaatgttacgtccagaggacatgaaacttagtggattaacattttttgtgttagggtgaaaatatgaaagtggggttagtgattaaaatgtgtgatggggaaaaataacaagtctgctgggggtgagaggatgaaaaatgaaaggcaacagtgctcaagactcacttctaagctactaaggcttctacatccttactcatcctactttcattcactagttgctgagttgtcaggatccggccaatttattctccaaccatcttgtaaaccaccttaaaacctttctccaataatgtatattgtcaagaatagcttttctgacatttaaattttgttaaattttcatcatttaacaaaatgttaaccctcaaactatattgtgtaggaatatatacatataaaaggtcaggccgggcgcggtggttcatgcctataatcccagcactttgggaggccaaggtggatggatcatgaggtgaggagatcgagaccatcctggctaacacagtgaaaccccgtctctactaaaaaatacaaaagattggctgggcatggtggcgggcgcctgtagtcccagctactcaggaggctgaggcaggagaatggcttgaacctgggaggcggagcttgcagtgagctgagatcgtgccactgcactccagcctgggtgacagagtgagactccatctcaagaaaaaaaaaaaaaaaggtcaaagtccttcacccttcttccagtcgtattcatacctcaaactctatagtgagttcgatgtatgtccttacaaattcttttttgatatgtatatgcacatggatatatacaaaattttgtttatgtgctctaatacaaatattatgttgtttttctaatcctacaactggatgtttttcaactcagtgatatttttacagttcaacagtataaattacaaatctatgtaaatgtgtttggctcctcttacagttgtatagtattcctattccacagaaagaggtatcatcattctcctattgatggatgttggttgttttaatattttctgttatataatgttacaattcttatatgtatctctcttttatctagagaatatttttctattatggttaactagaagcagaagggactgtttgtggattcacacactgtcccattgatctgtctatacctgtgttactatcataataccataattttacagcatattttaacatctggtaaggcaagttcctccccattaaaatctttttcaaaatgtctttgttattcacgcgcattgtctcttacaaatgaattttagaattggcctgtcaagttcacttttaaaaatcttatttgttggatttacatcatattcctaaattaatttggggagaatctcatccatgagctgtcttcctaatcaggctgaattgtgtgtattcagaacagtctaattattttctttacatagatattctatacttcctattgagtttcatgctagctatattttacagtttttacggctgttatgaatgaactctcttttcaggacatttagttgcgggacagtagaagagtattgctaattaagaaaaactttagaaacagagccaagatggccgaataggaacagctccagtctacagctcccagtgtgagcaatgcagaagacgggtgatttctgcatttccatctgaggtaccgtgttcatctcactagggagtgccagacagtgggcgcaggacagtgggtgcagtgcaccgtgcacgagccaaagcaggatgaggcattgcctcactcgggaagcacaaggagtcagggagttccccttcctagtcaaagaaaggggtgacagacggcacctggaaaatcgggtcacttccaccctaatactgtgcttttccgacaggcttaaaaaacagcgcaccaggagattatatcccacacatggctcagagggtcctacgcccacggagtctcgctgattgctagcacagcagtctgagatcaaactgcaaggcagcagcgaggccgggggaggggcgcccgccattgcccaggcttgcttaggtaaacaaagcagccgggaagttcgaactgggtggagcccaccacagctcaaggaggcctgcctgcctctgtaggctccacctctaggggtagggcacagacaaacaaaaagacagcagtaacctctgcagacttaaatgtccctgtctgacagctttgaagagagcagtggttctcccagcatgcagctggagatctgagaacgggcagactgcctcctcaagtgggtccctgacccctgacctccaagcagcctaactgggaggcaccccccagtagcggcagactgacacctcaaacggccgggtactcctctgagacaaaacttccagaggaacgatcagacagcagcattcgcagttcacaaaaatctgctgttctgcagccaccgctgctgatacccaggcagacagggtctggagtggacctctagcaaactccaacagacctgcagctgagggtcctgtctgttagaaggaaaactaacaaacacaaagacatccacaccaaaaacccatctgtacatcaccatcatcaaagaccaaaagtcgataaaaccacaaaaatggggaaaaaacagagcagaataactggaaactctaaaaagcagagtgcctctcctcctccaaagaacgcagttcctcaccagcaacggaacaaagctggacagagaatgactttgatgagttgagagaagaaggcatcagacgatcaaactactccgagctacaggaggcaattcaaaccaaaggcaaacaagttgaaaactttgaaaaaaatttagatgaatgtataactagaataaccaatacagggaattgcttaaaggagctgatggagctgaaagccaaggctcgagaactacgtgaagaatgcagaagcctcaggagccgatgcaatcaactggaagaaagggtatcagtgatagaagatgaaatgaatgaaatgaagcgagaagggaagtttagagaaaaaagaataaaaagaaacgaacaaagcctccaagaaatatgggactatgtgaaaagaccaaatctacgtctgattggtgtacctgaatgtgacggggagaatggaaccaagttggaaaacactctgcaggatattatccaggagaacttccccaatctagcaaggcaggccaacattcagattcaggaaatacagagaacgccacaaagatactcctcgagaagagcaactccaagacacataattgtcagattcaccaaagttgaaatgaaggaaaaaatgttaagggcagccaaagagaaaggtcgggttacccacaaagggaagcccatcagactaacagcggatctctcgttacccacaaaaggaagcccatcagactaacagcggatctctcggcagaaactctacaagccagaagagaatgggggccaatattcaacattcttaaagaaaagaattttcaagccagaatttcatatccagccaaactaagcttcataagtgaaggagaaataaaatacttacagacaagcaaatgctgagagattttgtcaccaccaggtctgccctaaaagagctcctgaaggaagcactaaacatggaaaggaacaaccggtaccagccactacaaaatcatgccaaattgtaaagaccatcgaggctaggaagaaactgcatcaactaacgagcaaaatcaccagctaacatcataatgacaggatcaaattcacacataacaatattaactttaaatgtaaatggactaaatcctccaattaaaagacacagactggcaaatggataaagagtcaagacccatcagtgtgctgtattcataaaacccatctcacatgcagagacacacataggctcaaaataaaaggatggaggaagatctaccaagcaaatggaaaacaaaaaaaggcaggtgttgcaatcctagtctctgataaaactgactttaaaccaacaaagatcaaaagagacaaagaaggccattacataatggtaaagggatcaactcaacaagaagagctaactctcctaaatatatatgcacccaatacaggagcacccagattcataaagcaagtcctgagtgacctacaaagagacttagactcccacacaataataatgggagactttaacaccccactgtcaacattagaaagatcaatgagacaggaagttaacaaggatacccaggaattgaactcagctctgcaccaagcagacctaatagacatctacagaactctccaccccaaatcaacagaatatacattttcttcagcaccacaccacacctattccaaaattgaccacatagttggaagtaaagccctcatcagcaaatgtaaaagaatagaaattataacaaactgtctctcagaccacagtgcaatcaaactagaactcaggattaagaaactcactcaaaaccagacaactacatggaaaccgaacaacctgctcctgaatgactactgggtacataacgaaatgaaggcagaaataaagatgttctttgaaaccaacgagaacaaagatgcaacataatagaatctctgggacacattcaaagcagtgtgtagagggaaatttatagcactaaatgcccccaagagaaagcaggaaagatccaaaattgacacgctaatatcacaattaaaagaactagaaaagcaagagcaaacacattcaaaagctagcagaaggcaagaaataactaaaatcagagcagaactgaaggaattagagacacaaaaaacccttcaaaaaattaatgaatccaggagctggttttttgaaaggatcaacaaaattgatagaccactagcaagactaataaagaagagaagagagaagaatcaaatagatgcaataaaaaatgataaaggggatatcaccaccgatcccacagaaatacaaactaccatcagagaatactacaaacacctctatgcaaataaactagaaaatccagaagaaatggataaattcctggacacatacactctcccaagactaaaccaggaagaagttgaatctctaaatagaccaataacaggctctgaaattgtggcaataatcaataacttaccaaccaaagagtccaggaccagatggattcacagccaaattctaccagaggtacaaggaggaactggtaccattacttctcaaactattccaatcaatagaaaaagagggaatcctctctaagtcattttatgaggccagcatcatcctgataccaaagccgggcagagacacaaccaaaaaagagaattttagaccaatatccttgatgaacattgatgcaaaaatcctcaataaaatactggcaaaccaaatccagcagcacatcaaaaagcttatccaccatgatcaagtgggcttcatccctgggatgcaaggctggctcaatatacgcaaatcaataaatgtaatccagcatgtaaacagaaccaaagacgaaaaccacgtgattatctcaatagatgcagaacaggcctttgataaaattcaacaacccttcatgctaaaaactctcaataaattaggtattgatgggacgtatctcaaaataataagagctatctatgacaaacccacagccaatatcatactgaatgggcaaaaactggaagcattccctttgaaaactggcacaagacagggatgccctctcaccactcctattcaacatagtgttggaagttctggccagggcaattaggcaggagaaggaaataaagggtattcaattaggaaaagaggaaatcaaattgtccctgtttgcagatgacatgactgcatatctagaaaaccccattgtctcagcccaaaatctcagggctgcaacttcagcaaagtctcaggatacaaaatcaatgtacaaaaatcacaagcattcttatacaccaatatagataaacagagagccaaatcatgagtgaactcccattcacaattgcttcaaagagaataaaatacctaggaatccaacttacaagggacgtgaaggacctcttcaaggagaactacaaaccactgctcaatgaaataaaagaggatacaaagaaatggaagaacattccatgcttatgggtaggaagaatcaatattgtgaaaatggccatactgcccaaggtaatttatagattcaatgccatccccatcaagctaccaatgactttcttcacagaattggaaaaaactactttaaagttcatgtggaaccaaaaaagagcccgcatcgccaagtcaatcctaagccaaaagaacaaagctggaggcatcacgctacctgacttcaaactatactacaaggctacagtaaccaaaacagcatggtactggtaccaaaacagagatatagatcaatggaacagaacagagccctcagaaataatgccacatatctacaactatctgatctttgacaaacctgagaaaaacaagcaatggggaaaggattccctatttaataaacactgctgggaaaactggctagccatatgtagaaagctgaaactggatcccttccttacaccttatataaaaattaattcaagatggattaaagacttaaatgttagacctaaaaccataaaaaccctagaagaaagcctaggcattaccattcaggacataggcatgggcaaggacttcatgtctaaaacaccaacagcaatggcaacaaaagtcaaaattgacaaatgggatctaattaaactaaagagcttctgcacagcaaaagaaattaccatcagagtgaacaagcaacctacaaaatgggagaaaattttcacaacctactcatctgacaatgggctaatatccagaatctacaatgaactcaaacaaatttacaagaaaaaaacgaacaaccccatcaaaaagtgtgcgaaggacatgaacagacacttctcaaaagaagacatttatgtagccaaaaaacacatgaaaaaatgctcaccatcactggccatcagagaaatgcaaatcaaaaccacaatgagataccatctcacaccagttagaatggcaatcattaaaaagtcaggaaacaacagatgctggagaggatgtggagaaacaggaacacttttacactgttggtgggactgtaaactagttcaaccattgtggaagtcagtgtggcgattcctcagggatctagaactagaaatgccatttgacccagccatcccattactgggtatatacccaaaggactataaatcatgctgctataaagacacatgcacgcgtatgtttattgcggcactattcacaatagcaaagacttggaagcaacccaaatgtccaacaatgatagactggattaagaaaatgtggcacatatacaccatggaatactatgcagccataaaaaatgatgagttcatgtcctttgtagggacatggatgaaactggaaatcatcattctcagtaaactatcgcaaggacaaaaaaccaaacaccatatgttctcactcataggtgggaattgaacaatgagaacacatggacgcaggaaggggaacatcacactctggggactgttgtggggtggggggagcggggagggatagcatcaggagatatacgtaatgctaaatgacaagttaatgggtgcagcacaccagcatggcacatgtatacatatgtaactaacctgcacattgtgcacatgtaccctaaaacttaaagtataataataataaaataaaataaaaaagaaaaaaaagaaaaactttaattggctgctttactaaaatctcttagtaatagctctttatcaatagattatcttgcatctcatgagtttttttttttttttttttgcatattgtctttaaggatgatgcatttgtctctttctaatttttttttctttttctggtctcacttgttcgacaagaatcaatgtgaattcagttcctactatactgtgaatagtagctgtgagagtttctatctgtctctcttatcgtcttttatcaaaattcatctgatattttaccattaagtatgacatctactgtaggtttctggtggatatcctttatcggatttaagaagtcttattttcttatcagcttagtaagaagtgtttttgttttattttgtttaagaaagatatgttaaattgtatcatgattttactatatttttcctagaaaatcatcattttcatctggattacgattactgatacagtgttgttgaacataatgtttaaatcatggtgattatagcccctttaatatttcaaaagtttatgcttttgtgccttttcttttataattgttgaacatttgactattttgttggtttgtttgaagagatttttgattcataaattctattttatgcttattttctattttattaattttgggtttaatgttaccaattcctgctactttctatgggcttactttattgtttccttactagttttgcttttcttttatttgaaacttaatttacttgttcctttatttttcttgttttctaatccatgggtttaaggctgtaaatgttcccctgagtactgttttgtccatatccaaaaagtttaaaatgtggtgttgtaactatcacttatttgtaaacaatttgtaatttgtttcacttccatgttaatccaagagtttttcaaggaatcactttaaatttccaagtggccagattttatctggtgtatttttatcgttaatgtctaattttattatgcacatatcatatgttaaaaatccaaaaatatggactacagtccttttgggaatttaacattcttacttgtggctaactactgaatcagttgtatatgtgccatatgtgatatttgaaaagagtgtgtaaactccattaggttataaagtatgaatgtgtgtgtgtgttgtttaagtaccctggtttttttccttaaaatattcgtccctttggtctttgatctctgaaaaacctgcttgatttgtcttgtttcatgcagtttgacttgatttctatttcagttgtagttcacatttcttcttctatgtttccattgcctgctgtcttttctctacctgttgttctcctttctaggacatttgcaatgcatttgtctcttgtaaagggtatatagttaacttatatactcaatctaagagtctgtctttttttgtatacacatttaattgttttgtccaaagtgatataggggacttttttttaatttgtactgaaaagcttataatgaaaaataggcagtggttttcttcattcttcctactctcttcttctcatagtcagccacttttaacattttttagttctagcagttacctctctaattaataagcttctatggctatttctttctttttttctttttctttctttcttttttttttgagatggagtctcactctgtcacccaggctggagttcggtggcatgatcttggctcactgcatcactgcagcctctacctcctgggttcaagtgattctcatgcctcagcctcccgagtagctgagactataggtgcacactaccactgcccagctaatgagacggggtttcaccatgttggccaggctggtctcgaacttctgacctctagtgatccacccaccttggcctcccaaagtgctaggattacaggcatgagtcactgcacccagtcagctatttcttgatttatcaatatctgtgcaattatagctacaaaagaaaagcatttaactcttttaatactgcactcctctgcactcccttattctctcaacatagctatatttctatttttaattgccaactatgtttatacattatgagtgtgcacatttttgatattgcaaaatagtgtactatgattatatttccttttccatgtattttcttcatatctctaattaccttttttctcttctactttatttacaatcaacatattctcatttcctttcaaatgttcctttcagagtattacttatttccccaagagtagtatctattttccctctcagcgtattctctactcctgttccactacatagtaataactcactagggttgccattagggaaatgcaaattaaaactgcaatgaactatcattacatgcctatcacagtaacaaagcgttttaatatagtgacaacagcaaatgctggcaaggatttggagaaactaggttgctcttacattgtttgtgggaatgtaaaatgatacagccactctggaaaactgtttggcaatttcaaaaaaaaaaaaaaaaactaaacatgcaactaccatacatcctaccacttggcatttatcccagaaaaatgaaagtttacttttatagagaaacttgtacacaaatgtttatagcaactttatacctaatagccaaattggaaataatccagatgtccttaaattggtgaatggttaaattgtggtatatccataccatggaatactactcagcaactaaaaaaccaaactatttatacatacaacaatctggatgaatcttctgagaattctactaagtaaaaaaggcaatcccagaagtctaaatgctgcacaattccatttatgtaacacttttaaaatgataatagaagtagggaacagattagcggttgccaagaggagaagagggtgtgtatagctccctttcttgttttctagctaatggatgcattttaaaataccttgtttaccttttaaaggatttagagagaaaagggataggtaggcatgtgtgttggtttggcctcttgattcaagttctaagtcacttctcctttttattcagctgtatgctcagtaaacatgacctcagactaacattagcttaagccaacacttgtggaagtgtatctggtatttcaaaaaattgtgtaagttagctagagacaaacacaaaactaaggttttatgtcagttggtgaaggattattcctgacactgatttcttcttcttcctgtaatatttgaaaagttatagacccatggagtaataagaagtttttggaatatgtgagttttttcctgagatatgagttccttgaaggcagaaactgtgtctttttcatttctattccacacctgctacattacacaagcattggccttctttttgttcttgaaccagttcccccaccacaggacctttgtacacgatggtccctgtgctgagtacattgcctctcccactcacttgcccactgattgttcaggtgtcttttaaaagacatttcttcagagaagcattttcttttttttttattttttattttttaattttactttaagttctggagtacatgtgtagaacatgcaggtttgttacataggtatacgtgtgccatggtggtttgctgcacctatcagcccatcatctaggttttaagccccacatgcattacgtatttgtcctattgctctccctccccttgccccccaccccttgacagaccccaatgtgtgatgtttccctccctgtgtccatgtgttctaattgttcaactccaacttatgagtgagaacatggggtgtttggttttctgttcctgtgatagtttgctgagaatgatggcatccaggttcacccatgtccctgaaaaggacatgatctcattcttttttatggctgcatagtattccatggtgtatatgtgccacattttctttatccattctatcattgatgggcatttgggttggttccaagtctttgctattttaatagtgctatagtaaacatacttgtgcatgtgtctttatagtagaatgatttataatcttttgggtatatacccagtaatgggattgctgggtcaaatagtatttatggttctagatccttgaggaattgccacactgtcttccacaatggtagaactagtttacagtcccaccaatagtgtaaaagtgttcctgtttctccacatcctcaccagcatctgttgtttcctgactttttaataattgccattctaactggcatgagatggtatctcattgtggttttgatttgcatttctctaatgaccaacgatgatgagctttttttcatatgttcgttggccacataaatgtcttcagagaagcattttctaagtatttactctagaccaggcctatcataagtgctattatgccctccaccttttcttcgaagtaatatttacagctgcaagcatctatttatttatatagtatatttttaagtttaaacagatttctttattatagaacttcttagagtctttcacatctaatatatataataaaatatttcccgaatttaatttgaccatcactgcatgtttcatggggaaaatgttccgtggacacttcagaagatttagaccaggaattctcaaaccaagctgcacattggaatcactggggatcccttctaagaccaatcaaatctgagtctttgcagggtgaaggcccaagaatacatatatatatatatatatatatatatatatatatatgtatgtgtgtgtgtgtgtgtacatatatatatgtatatgtacacacacacacagtctcgctctgtgtgtgtacatatatatatatatgtattcttgaaggcccaagaatacatatatatatgtgtgtgtgtgtgtgtgtgtgtgtgtgtgtgtgtgtgtgtgtacatatatatatgtgcacacacacagtctcactgggtgacagtctcgctctgtcacccaggctggagtgcagtggcgctatctcagctcactgcaagctctgcccctccaggtttaagcaattctctgcctcagcctctggagtagctgggattacaggcatgtgccaccatgccctgctaattttttgtatttttagtacagacagggtttcaccgtcttggccaggctggtcttgaactcctgacctcgtgatccacccacctcggcctcccaaagtgctgggattacaggcgtgagccaccgcgcctgaccaagaatacataatttttaagagctactaagtgatgttaatgttcatgtaggctgagaacataaggtcaagtttttaatatctatccctcccaccaggctgtaagtctcatgtaagccataatgttttgttcattcctgtattcctagcataggacatacccatatataaaataggtactcagttaattaatgtatttactcattaacaatttagtgacagctattacgtgtcagactgtattctaggcagcggggatgtaaccataaacaaacagacaaaaatccccatctctgtggagcttacattttatggagtaataataatacatactaagtggttcctacatgccaagccatgttcttatgactttatatacatgaattgacttaattctcacagcgtatctttaggaggcattattgcctctaattcatggttgagaaaactgagatacaaggaggttaagaaatttgtgcaaggtcccataataagtaggggctgagcagggagttgaacccacgcattgttacgcaagggcccatcagtaaccaccagcaaatcctgggcaataaaatgtctctgaattaacaaacaaatgcatgaattggtctctgaatcacctaaagcctaaggaggtatcctgttcacgatggcaagccagtcatttagccccatctcccatcttctgctctacccccacaggtccccttagagggcatctccagccttggagtgaatagcgctacacacaagggatgcacttcccagtagggcagatttttccattgttgaataggagtttctaacctttctggcttgtatcattcattttaaaatcaggtgggctgagtcacagataaaataaacacaccgtgggcacagcaaacacactacagaaactcctaatcttctccaaatatttcacacgatatggaaaaatttcagaaccaaccaaaaataaataaacaactgttgagatgatttacagtctggccaataagcaggctcagggtctatctggctttctcaatctcaggaccatctgccaatccttttgctccagattgtggaatcaggaacagcatcagaagttagaggaaccatatttcagaaaactttctctaatatttaccatttaactattatatgcctcgcattgtgccagctcttgtcatatgcaaaagctccctgatgactttccactgattttagctctgacctccgagagcacccaggaagtctgaatagcagctcttctaatatttgaaaattgctatcaccttcctctttttcctgccttaggtcattttgttccaggctataaaatatcccctgttcctttcattggccttcatatggtatagtgactctttctcttaagtgtaaggcccaccgttaaacaaaaccttcagtcctgtggcctgagtggctctgataccaacagaactgagtctttggccatttgtatacaatacctctgaggaatccacctaaaactcttcctacctaacatcactgcagggaagagtccagtggaaatttctcattctttagacatgttctttccttcctccaaacctcttctctgcccaataaacccttagtcatccttcaaaacaaagccctcactggcccccacctcccacccatacagaaccagccacttacatcctctgtaacacttcagtggcctgcaaacactattttcactcagcacattagacaacatgacatttatttgcatgcctgtctctatggataacttgagggcaaaaagaaattacacctcattaactgtcagtgcacagtacctggctagttgttgagctgaactaaactcttgataagaaacaactatgaaagcaaaaattctgtgtaaaagcaaaaggaaaacataagaataggtattatttgtttgttattcaaaaaaccttcagctaggtaatgtgggcacagtgaagatgtgctatacgtgatttctccctgtagggagcatatagttaagatgtcatttactcattcattcactcattcattcacccatcattcaacaagcaccactgaagttcctactatgtgccaggcatttttctagtcaccacaaatgcagcagtaaataagatcagcacagttgctgccgtaatagtggagttcctagccaagcagtgcaggaatttactaatatttaggcatccattcctttaccagtcaacaaatactaagtgttcatgatgtatcaggtagtgcacaagcctctgagtatgcagcaatgaacagactaaacacagtccccttgtttatggagcttggatgttagtggtgaaaacaaagctcaccaacataagaattcactttgcagtgtaaagaaaataaaacctgtcattgaccaaagtgttgaggcaagcctttttaactgactttgtccaacacccttctttcagtgagcctcacctcaaatcattttcttttgtaagtactgtggttcacagctctcttctcagacccctgccccttgtcttcagtttcatcttacactatggtggctcctccaagctcactgtcttcaacacacttgccactggaaagtttctgcaaaggtgattatgtcaccaacttagtagagcagcttattcctccctcttccctgtcatacacccctcgggaactctggagccatgaagccttggcggagatggaggcccaccaggcagctctttattgccatgcaactgtgagattcctctccacacttcctcctggggaaaagtcagcctgccagtggagatttaacagtggagtagtgcatagtgacttgccaagtttcccctgccccccagctaccgccatccccaccatccctacccctggactgaacaaatggcatcacttatcccctgggagcctggcagttgctgagcccatacgcctcagggactggtgagcttccagtggccacagaggcaggtctccactcaaggcacatgcagactcaagcagagctgtgtctgtgactacccaactggacacgcagctggcactggagatgataagccgctttctaggtcaccttctccctgcagagatttttctcttgaatcatttttggccagatccctttgcagcattatagtttgtcaatagtccgcgactgctttctagaatttctctccaggaaaaagtgtgtttttctaagaaataggtgttgtagcctgaagcctaatttcatgagaaggctcaaaactgaaacaaaaataatcaccctcaagtctggaagctgaagggcctctccagtccctgaagggtacttccctttgggaggttgggggtggaaggtgtccctttgtgttgttttaatacaatttttccaattataaaaataatgtaggctccttatatcagctagggttccagcagaaaacagaagccatgctcatcttgaattttgaagaaattttaatgaagggattatttacagagaggtgacgagggttcatgaaaggacaagggattttaaagcacttagggactaacaacattgggccagtcttatcacccctacacttgaaaaggagtggggtaaaacgtggggtgagaggagcaccaatcagacgctgttgtgtgaaaagacacaaccacagccatacggaggcactggctgtacccaactagcagcccaagggcaaggggccctgggtgatgcagtccataggtgtcagcctcccaaagacacagagtgggacagagaaggtccataaagaattccagggtgaaaagactgaaaagacaaattgttctagaggaccaatggaaaaaccaatataataatcatagaacattgtaggccgggtgccatggctcacaactgtaatcccagcactttgggaggccaaggcaggcagatcaattgaggtcaagagttcgagaccagcctggccaacacggagaaaccccacctctcttaaaaatacaaaaattagccaggcatagtggtgcatgcctgtaatcccagctactcgggaggctgaggcacgagaatcacttgaacccggaaggtggaggttgctgtgagctaagatcgctccactgcactccagcctggcgacagagcaagactctgactcaaaaaagaaaaacaaaggtggggggaagcatgattcccttccctggaacttcttcagtgcagactctgcgtctaactcacttttgcatccctcaagtggccaacatctgtagagtaatagttccaaaaatagctattgaatgaataaaatgacatcacttctctctcctggaacaaaatgaaaacaaaacaaaacaaaacaaaaaaaacaaaaaaatgcttgatgtcagctgggtccccagaaactaaaatgtgtgcagcatctttttcacctcatctacaccctactgtttgagagcacattttaagaaggggccacgggccaggcacggtggctcacacctgtaatcccaacacttgggaggccaaggcgggcagatcacttgaggtcagaagttcaacagcagcctggccaacatggtgaaaccccgtctctactaaaaatacaaaaattaactgggcatggtggcacacgcctgtaattccagctactcaggaggttgaggaaagaggatcacttgagcccaggaggcggaggttgcagtgagctgagattgcgccactgctctccatcctgagcaacagagctagacttcgtctgcaaaaaaaaagaacatcgaacattgcaaagagcaggaaaaaatcattcttacttttacatcccaaagaaatctactccttgaagaaacttctggtttttttttgacattttataacaaagttaagattatacatttaataattattataatattattatacctacctaaaaatagtgatgaatacttgtcaagcccataccatgtgctagccattgggtcaggactttataggcattgcttcttctaaacctcatacagtcctgtggagtaggtactactattatcctctcctaatgaatgaggaacctaaggcaaagacaagaacttgctgaaggtcccacagccagtatatgccagaatcaaatttaatcccaatcattgatcctagggtctttcctcttaaggactacactatcccaccagcttttccaccacccatcagcttaaaggaagtttctaatagtttcttcccccatcttgatttttctagtttcaaatcatatagttgcagaaagctaaatgtagtatatgaaataatatcaaactctcctagtctaccagtctaccccacctccaaagaaaagaaaaataaaattaataaaatttttaaaattagaaaaattatatatagttttataaaattataaagttaattttatactcatactcaaaaacatgagtcaagtagcttaaattttaacaaaaattgacatctaaatagatgaagatccatcacccccaactaatcccactgcctcagatgttaaacaggaacacatccatgaatgctgagagcaggctaaacaggatgggctgcctacacattcaccgcatctaaataaataggtttggagatcttctaatcaaccatttccatttctgatgacgtgtgtgctaagaactacaccaatcaatagaaataattcatcaagggaatggtggttaaactgttcactgccaaagaactgtccactgccaaaggaaggatttagtctgttctacaaagtgctttaaattctgacaatgtgcatttggtttaggaaagtccatcccactcttcagactctttactacaatgactgatgaacccgtcaagaaaaatgagattaactatattctaaaaaatgcctcacatcaatggcaagtgtttgtcaaaatcttgacttgtctgttctatacagtgtgttaactatggcatgatataaactaagccaaagtgatacaatcccctgtgagcccatgacctgggaaggatgaggtcattgtaaactttggtagcagaaccacggtcttcactaagacagaattatgtagaggaaagagacctagcctgaagtcaggaggctattgtgctagttctggtcctgccgtaactacctgtgtgaccttgagtaagtcatatctcgtctttaaaccttagttctccctgtgaagaaattagggaataagattaaatcagcggttttcaaacatctatagaaacttaggtctccacagagatgcctatggcctatgggacaacatgaagtgacaggggaggtggcagtagggggtttcccagattccgttttctaaattaggtcttcctgttgtattctttcaggggaccatgtaagcttctctcacagtccttttcccactttgtaatttcatctttatttatatattaattacttaatatctgtttttttctagattatattctccatgagagcagagactatgcctatttaattcaccgttacaaacccaatgagtagcccagtacctggcacttggtacatgatacattattgaatgaatgaatacatgaatgagttaatacctctcatttctggccctggaagtgcctgtgaacatggatatgattagtctcagtaaagaaaacacattgttttcctcctcctctttattactacaccaagtgtaaagaactgtgtctgagttgtggcttggccctacctccttgctaactatatgaccttgagtacaaaggtcataacttctctgagctttggtttccttttctttaaaacaactaggttaatttgtgatatctcaggtctccttctatagcattccataatttcattatttagtctcttcctcaatccaaaagttaaataaagctgatgatcctgcataaatttagtattcaatagcatagagttaatctgtggaaatgaacaagctctctctggtgaagagatacccagagattatatgagatgccctgagacatacaaccatgaattggcaaagacacagaaccaagagacaagtcattactctgccacctaacatctttgtgatcttggaaaacgtttcatctcttctgataaggagagtattactgtcccagctgccccatgtgatattatgaagaacaaaacaaatgagataatatgttataatgctttgtaaattataatgtgcagtataaatgtaagataatactatcactattaggttaacataaaggtcataaagccaaaataattaagcaatgccatgctggtacataatagaccaatggattcgaaaggaaaattcataagtagctccaaatacagaaattttgtataaaataaaaatgatgtcacataccagtgaggaaaatacataaatttcaataagaaggctactgggctaccatctaaatgtaaaataaaattgtattcatgtttcactttattatgtgaaacatgataatattagtttatatcatgccatagttaacacactgtattccagagtacattataaggggaccagagatttccatataaaataaaataataaaatttctagaataaaacatgggagaaatcttttataactacaaaaggaaaggcatttataccatagtatggtttaatatcgagaaaaaaactcaacctcactttttaagagaacttcaacaaaaacaactatgagcaaagtaaataagacaaatattcataacaatggacacaggctcatttttttttttaatctctcatcacacaagtcataaccccttatttaggctttgggtttttatttttctgtaagttattggggtacaggtggtattcggttacatgagtaagttctttagtgatttgtgagattttagagcacccatcacccgagcagtatacactgcaccatatttgtaatctcttgtccctcgcccctctcccactcttctccccaagtccccaaagtccactgtattattcttatgcctttgcgtcctgatagctttgctcccacttatcagtgagaacatatgatgtttggctttccgtttctgagttacttcacttagaataatagtctccaatctcatccaggtcactgcaaatgctgttatttcattcctttttatggctgagtagtattccattttttatatatatatatatatatatatatatgtatcattcctttttatggctgagtattccattttatatatatatattatatatagtgatatatatacagtgatatatatatatatatcacaatttttttaatccacttgtggattgatgggcatttgtgtttgttccacgattttgcaattgtgaattgtactactataaacatgcatgtgcaagtatcttttttgaataatgacttcttttcctctgggtggatacccagtagtgggattgctggatcaaatggtagtcctacttttagttatttaaggaatctccacattgttttccatagtggctgtactagtttacattcccatcagcagtgtagaaatgttccctgatcactgcatccacaccaacatctactgttttttgattttttgattatggccattcttgcaggattaaggtggtatcacattgtggttttgatttgcatttccctgatcattagtgttgttgagcattttttcatatgtttgttggccatttgtatatcatcttttgagaattgtctattcatgttcttagcccactttttgatgaggttgttttttttcttactgatttgtttgagttcattgtagattctggatattagtcctttgtcagatgtatagattgtgaagattttctctcactctgtgggttgtctgtttactctgctgactgttccttttgctgtgcaaaaagctcgtgcaaaagtttaattaggtcccagctgtttatctttgtttttattgcatttgcttttgggttcctggtcatgaaatcttgcctaagcaatgtctagaaggatttttccaatttaatcttctagaattattatagttttaggtcttaggtttaagtccttaatccatcttgagttgattttttttataaggtgagagatgaggatccagtttcattctcctacatgtggctagccaattatcccagcaccatttgttgaaaagggtgtcctttccccactgtaagtttttgtttgctttgtcaaaaatcggttggctgtaagtatttgggttatttctgggttctctattctgttccattggcctatgtacctatttttatgcgagtaccacgctgttttggtgactatggccttatagtgtagtttgaaatcaggtagtgtgatgcctccagatttattctttttgcttagtcttgctttggctatgtgggctcttttttggttccacatgaattttataattgctttttctaattctgtgaagaatgatggtggtattttgatgtggattgcactgaatttgtagattgcttttggcagtatggtcattttcacgatattggttctacccatccatgagcatgggatgtgttttcatttgtttgtgtcatctatgatttctttcagcagtgtttttagttttctttgtagaggtcttttgactcctttgttaggtacattccgaagtattgtattgtattgtattgtattgtattgtattgtattgtattgtgttgtgttgtgttgtgttgtgttgtgttgtgttgtgttgtactgtattgtattatattgtatattttgcagctattgtaaaaggggttgagttcttgatttgattatctgcttggctgctgttggtgtatagaagagctactgatttgtgtacattaatcttgtatctgaaaactttgccaaatttttttatcagttctaggagctttctggaggagtctttagggttttcaaggtaaacaatcgtattttcagcaaacagtgacaggttgacttcctctttaccaatctgaatgcccctttttttctcttgtctgattgctctggctaggattggtaccaattcttctttgaatgttgaagaggagtggtgagagtgggcatccttgttctgttccagttctcagagggaatgctttcaactgttaaccattcagtattatgttggctgtgagtttgtcataaatggcttttattacattaaggtatgtccccttgtatgccaattttgctgagagttttaatcataaagcaatgctggattttgttgaatgttttttctgcatctattaagattatcatgtgatttttgtttttaattctgtttatgtggtgtatcacatttattgacctgcatatgttaaaccatctctgcatccctggtgtgaaacccacttgatcatgatggactatctttttgatatgtcattggattcagttagctagtattttgttaaggattttagcatctatgttcatgaaggatatcagtctgtagttttcttttttggttatgtcctttcctggtttgggtattagagtgatgctggcttcatagaatgaattggggagagttccttctttctctatcttatggaatagtgacaaaaggattggtaccaattctttgaatgtctggtagaattctgctgagaatctgtgtggtcttggactttttggtggtaatttttaaattgccatttcaatctcgctgcttgctactggtctgttcagggtatctaattcttcctgatttaagcaaggagggttgtattttttccaggaatttattcatctcttctaggttttctagtttgtgtgcataaagatgttcatagtagccttgaatgatcttttgtatttcagtggtgtcagttgtaatatctcctgttttgtttcttagtggggttatttggattttctctcttcttttcttggttaatcttgctaatagtccatcaattttatttattttttcaaagaaccagctttttgtttcatttatgttttgtatttttgtttgtttgtttgtttgtttgtttcaatttcatttagttctgctgtgatcttggttatttccttttttctgctgtgtttgggtttggtttgttcttgtttctctagttccttgaggtgtgaccttagaatgtcagttcgtgctcttttagtctttttgatgtaggcatttagggctatgaactttcctcttagcaccgccttgctgtatcccagaggtttcggtaggttgtgtcattattgttgttcagttcaaataatgttttaatttccatcttgctttcgttttgacccaaaaggagcagtatgcctgtatttgccatgtatttgcatggttttgaaggctctttttggaattgacttccagttttattccactgtggtctgagagagtgcttgatataatttcaattttcttaaatttattaaggctcattttatggcctataatatggtctatcttggagaaagttccatgtgctgttgaatagaatgtgtattctgtggttgttggatgaactgttctgtatatatctgttaagtctatttgttccaaggtatagtttaaattcattgtttctttattgactttctgtcttgatgacctatctagagctgtcagtggagtatttaagtcccctactattattgtgttgctgtctatctcatttcttaggtctattagtaattgttttataaattttagagctccagtgttaggtgcatatatgtttaggattgtgatattttcctgttggacaaggtcttttaccattatataatgtccctctttgagataagaatagctacacctgcttgcttttcgtgtccatttacatgaaatgcctttttccacccttttactgtaagtttaccttatgtgttaggtgagtctcctgaaggtagcaaatggttggtgagttcttatccattctgtggttctgtatcttttaagtggagcatttaggccatttacattcaatgttagtattgaaatatggggtactgttgcattcatcatgctctttggtgcctgtgtactttgattttttgtttttttctttttaacttgtatttttgttttatagttcctgtgtgatttatgctttaaagagcttctgttttgatgtgtttccaggatttgtttcaaggtttagagctccttttagcagttcttgtagtggtagctttgtaatggtgaattctgtcagcatttgtttttctgaaaaagactgtatctttccttcatatatgatgcttagttttgctggatacaaaatccttggttgataattgttttgcttgagaaggctgaagatagggcccctattccttctggcttgtaggggtcctgctgagaaatcttctgctaatccaagtttttcctttataggttacctgatgcttctgtctcacaactcttaagattctttccttcttcttaactttggataacatgatgacaatgtgcctaggtgatgatctttttgtgatgaatttcccaggtgttctttgtgcttattgtatttggatgtctaggtcactagcaaggctggggaagatttccttgattattcccccaaatatgttttccaagcatttaggattctcttcttcctcaggaacaccgattattcttaggtttggtcatttaacataatcccagacttcttggaggccttgttcatattttcttattcttttgtctttgttagattaggttaatttgaagaccttgtcttcgagctctgaatttctttcttttacttgttcaattctattgctgagactttccagagcattttgcatttctaaaagtgtgtccaaagtttcctgacttttttatggttttttcttcaagcgatctatgtccttgaatatttttcccttcacttcttgtaccaccttttggattttcttgcattgggcttcacctttctctggtgactctccgattagcttaataactaacctcatgaattctttttcaggtaaatcagggatttcttcttggtttggacccattgctggtgaactagtgtgattttggggggtatggaagagccttgttttgtcatattactagggttggttttctggttccttcttatttgggtaggctctatcagagggaaagtctagggctgaaggctgttgttcagattcttttgtttcatggggtgttaccttgatgtaatactctcccccttttcctatggatgtggcttcctatgagtcgaactgcagtgattgttgtctctcttctgggtctagcaacccagagagtctacctagctccagtctgatactggggagtgtctgcacagagccctgtggtgttaaccacctatgggtctgtcagccatggataccagcacctgttccagtggaggtggtggtggggggtagtgcaatgaactccatgagggttcttagctctggtggtttaacgctctatttttgtgctggttggcctccggccgggaggtggccctttccagagaccatcagtagtatccatatttctaatatataaatagctcttgaaatatatatgaaaaaatgagggaaagattgttcacagagaagcacagacaactcctaagcatataaaaagatgttcaaactttctcattatgcaagaaatgcaacctaaaactaacttgaggtatcacttttcacctttcagaatatcaaaaacttcaaaagtttaatatacgctctatagattaagttctaggaaacagtcaacttcatataatgctgggagaagtgtaaattattgtcacccttatggagagtagtttggcaatatctatcaacattacaaatgcaaataatctttgacctggtaattctaagtagggggatttatcctacaactacacctagatatatataaaataacatgcacaagagttgtttgtaagaatttttaaaaagtaaattgcatcaacgttgtttaaaggagtaaaatatagagtatctttcaattaggaactaattaaataaattatcatacacatacatataaaacagctataaaaaagaatgtgggatctcattttgaattgtatatggaaggacctccaaagtatattgttaaaaaattgaaagagcatatatgtaatatactaccttttgtgtaaaattgagggaggaggatctatattcacatttgcttgaatatacataaactcttggaagatgtataggacgctaagaacaacggatatctatggtgggagggaaaatctaagaactgggaagatggtaaataaggaataagggagtcttatctctttataattgtttataccttttggttttttaaccatgtagatctgtttaaaacatttaataaaaggatcaaaataaaaataaagttaatgagatacagaggaaacagactgaggcaagagaggaaaaggcaatgggaaaaaataggtcagacagaaggctaccataaaggaatagtctttaaaatcacgtaagggcagtcaaaaagaggaggtcaggtacagactcttttcatcccatacgcaggaatagaaaatattcaaaagtatgcctgaaagaagggatagcgagaacaaagttttctgtaaatttccacagtgttttttccccctatattgacaaacaggagaaaacaatacagtaagctaaaatgggcaaattatttcaattctttcagggaggaagaaaaatatctccatggctatcatttctgtaaccatagagggtgaatttcatgaagcaggctcccatactgaattaaataataaatttccccaaaagagtcttttatagtgcttatttaagctatcgagaaagagaagagtcttaaatgacaggagtgtttacgtatttaatttttgtgtaatattagaaccataaaccctctctctttcagatggggaatatgtgacacatgcagttaatttctacgttaaattattgaatgaaaaatacacacattatccattgcgactccaggattaggtcaggtcaaattttattgcttttggccaagggcttttgtaagacttacaaggctaggagcaggtacagtgtgatctttggtataagttatagagttagagtgaggttctgagtgggaaaatgcatagcatttcagaggtaatttcatgaaagtcatcatgagaccagcatagtatcatgctgacctacctagaactttataagatcactttagctctggtttctgaaactgccatggttcatgtatccacctgacaataaataaccaatcttttctagattgatctgtaatggatgctaattggaattagccccaagaagtatctggcatggggccaggtataaatagggaggggaaaaaggggaaggaaatgtggataattctgtagctcaggggttccaaaaataaacatttgataagctaaaattgtctaatagtatctgttttcaaacttggaggtaagcatggaacccagaaagaggtttaattattttaccagagtaaacaaaatctgtatctgattaaaaacagtctaccatacagagcattttgaacaaagtgctatcctttagattgatttatgagagaaatgacgtaggagtagtagcagtaatactaggaaatatttactgagctcttaccaggtgccaagctaaatgttttatatgtgttatatcacttaatcctctcaaaaatcttatgaggtaggatatattcttaactgcattttgtagatgaggaaattcaggttcagaaaaattaagaagttgcccaagtctaacaattagtaagtgaagaaaccagaatacatatttctctgaagtgtgtgctcataacatcaaatcaaagctccatcagtgttaatacacattcaggcttttattgttctgtaagcttacttatgatcaatagattctttgtatttgattatggcctcttaatcataggcttgaattaaagggaatccgaccactcccatctcagaactcccaaagtaccataggactaaaaatcaaatagaaaatagattagaacactatcacaaagaatatttggctacattaactgtaggacattttagctacatatttctgtatcagaaataagttaaactagaatgatcttagagataagtttcaataaaatttcttgatgctttcttcaataacgccaattactacaactgttttcaatataaactttctagaagagctttgtgttaagcacaaatagctaaatatttaaaatcttttttatctttttttttttttttttttttttgacagagtcttgctctgctacccaggctagagtgcagtggcgtgatttcggctcactgcaacctccgcctcccgggttcaagcgattctcttgcctcagcctcctgagtagctgggattacaggcataggccaccatgcccagctaatttttgtatttttaatagagacagggtttcaccatgttggccaggttggtcttgaattcccaacctcaggggatctgcccacctcggcctcccaaagtgctgagattacaggcttgagccaccacacccagccaatatttaaattatttataatggtcaatcagttggcccattatagtattctgggtgtctctttgaatattatcaaagatgtttatacacattttatcttcctatgtgagtgtttgttaaccatattttctccatttcttttcttcgagacactctagttaactctgggttcctgttatgaattaatataggtataaattactagcagtggattaggatatagacacctgtgaaaatggtggacgctcttatgcggacccaccagggatacactctgaattatcttggtggtgaagaaagagcaatcagattcttcattctcaaaaactacattcaactcacatatattgcagaaaaagagatgagatggtcagagatactaaggttagattattggactaatgaaagattttatttctgttacctatttcaaattatttacaccaggctaaaaaagagagaaagaagtttggtgtagtctgtgatgtgagcatccttcctggttacagaggcaactagctccttaaagatcagcattgcagattctatacagatgattaaattgatgtaaaaacaaaagtttctcctctcactttagactgggtttgaacgcaaaaagtaaaaacaatagagttagaaggcagtcatgagattatgttacttagaatacaaaatggtaaatgcttttaagattttttttttttttttgagatggagttttgctcttgttgcccaggctagagtgcaatggcgcaatctcagctcactgcagcctccacctcccgggttcaagaaattctcctgcctcagcctcctaagtagctgagattaaaggcgcctgccaccatgcccagctaatttttgtatttttagtaaagacggggtttcaccatattggccaggctggtctcgaactcctgatctcaggtgatccacctgcctcggactcccaaagtgctgggattacaggcctgagccaccaggcctggccaagattatttttatgtctgtgtcttatgatttgtttccccaccttataagattccaagaaaggagctgactttcagtaatcttaaaatctcatcctgggactgtttgcacttacaggaagatagagcagatgtactttccctcattcttcctgctaaatgcaaccaaaaacactgaacattgtacataaaacaagcataagaagaccctggaaggtgaagaaagaaagcagaccagctagtggcctcagagcctaagaacaacacggagatgacttctgggacttggagttgaagaacatctcatactagtgtcatttatttaaaagtttgttcctaaagccatcaaaattaatcctgatagctgactgctctgtgatgaagacagcctcacagaagttaatcagcatctctttaactgagactcaaatggacttcatgacccttgttcctcctgattgagccaaattattcccagacagctacatcatgattataatactcttaatatgcctagcttttttctaaaatgttagtttaataagggaaaaacaggtactattttttaaacacaagcaatcacgattaccttcttcattaacttgaatttgttctcagttcctctacttagctgtgtgaccttgaacaagttacttaacccctctgcctcaatttcttcttaaaataggaaggcagtgcctctgttttcagaatcataaaaattgatccaccattacttaatataatatataatttttttaaaaaaactgaaagtagagtactattaagcagaagaaaagccaggccaattttaagaggtaaaaccccaaatgacagagttttcattttctttattttaattttatattgttgtatttttttgagacggagtctcactctgtcaccaggctggagtgcagtggcgctatctcggctcactgcaacctccacctcccaggttcaagtgattctcctcccgagtaactgggactacaggcatgtgccaccacgcccagctaatttttgcattttttggtagagatgggggtttcaccatgttggccaggtttcaccatattggccaggatggtctcgatcacttgacctcatgatccgcccacctcggcctcccaaagtgctgggattacaggcatgagccaccatgccaggcctattattattatttttaattcacaaagaattgcatatagttatggggtataatatgatttgatctatgtatacattgtagaaaaattcaataaagctaattaacatatccatcacctcaccaacttattgttttgtggtgaggacattaaaaatcttttcttttagcaattttgaaatatataatgtattattaattaactgtgattaccaagcagtgcaatagatcactaaaattttttctaccagtctcaccaaagctttgcatcctttgatcaacatctccctttccccatctctccatctccagcccccaccaccgtctctctgccaacctctggtaaccacctttctactctgcttcagtgagatttattgaagagattgtcttttcttgactatattattcctagcatctttgtcaaaagtcaactgatggtaaatacatgggtttatttctaggctttctattctgttcctttggttgatgtgtctgtttttatgacaatactatgcaattttgattacaatagctttataatatattctgaaatccagttttgttatttttgctcaagattgctttgattattttgaggtctttgctggtttcatacaaattttagggttgtttcttctgtttctaccaaaaaatgactttggaattttgatagagattgcatcgaatctgtaaatcacttcaggtagtataaataatattaattcttacagtctatgaacatgggatgtctttccacctatgttttgtcttcttcaatttttctcatcactgttttatagttttcagtgtacagatatttcaccttggttagatttactgctacatatttttatgctattgtaggtaggattgttttcttaatttctttttcagatactttgtttttagtgtatggaaaaatactaatttttttaaatttgattttgtaacctacactctactgaatgtatcagttctacaggtttgggttcttctggtggactatttaagattttctatatgtaagatcatgttatcagcagagacaatttcacttttgctttcctgtatgaatgtctttttatttctttttcttgcctaatttctgtggctaggacttctagtaatatgttgaatagaaatggaaagaatgggcatcctttacttgttcctgatcttagagaaaaagctttcaactttttaccatttagtaagacattagctgtcggcttgttgtgtatggtctttattgtattgaggcagctttcttctatactgattttgtggagactttttatcatgaaaagatgttgaattttgacaagtgcttttactgtatctattgagataatcatatgggtttcatccttcattatgttaatacagtgtatcacatttattgatttatatatgttgaaatcccttcatacccctggaatgaatcccacttcatcatggtaaattatatttatagtgtgctgttgaattgggttcgctagtattttcttgaggatttttgcatctatattcatcagggacattggcctgtagatttcttttcttgtgttattccttggctttggtatcagggtaatgctggcctcataaaataagttcagaaattattctctcctctttgattttttggaagagtttaagaagtattggctgttttttaaatgactggcagaattcagcaatgaagccatcagattcaaggattttctttgatgagaaacattttgtcattaattcaatttccatactcatttttggtctattgccaatttctatttcttcctgattcagtcttggtatgttgtgtgtttctgggaattcgccatttcttctagattatctaatttcttggactatagttgttcatagtagtctgatcttttgtatttctgtggtatcagttgtaatgtctcctctttcatttctgattttatttgtgtctgtgatggtttaatattgagtgtcaacttgattggattgaaggatgaaagtattgttcctgggcgtgtctgtgagggtgttgccaaaggagattgacatttgagtcagtggactgggagaggcagacccaccctcactctgtgtgggtaccaactaatcagctaccagcatggctaggataaaagcaggcagaggaatgtggaaggactggactggctgatcttctggccttcatatttctcccatgtcagatgcttcttgccctggaacatcagactccaagttcttcagcttttggactcttggacttataccagtagtttgcaaggggctcttgggtctttggccacgaactgaaggctgcactgtcagcttacctacttttgaggttttagaacttggaccagctttattgcacctcagcttacagatgacctattgtgggacttcaccttatgatcatgtgagtcaatactccttaataaacttcctttcaaatacgcgtctatcctattagtcctgatcctccagagaaccctgacagtgtctttactccttttttctttgtaagtctaagtaaaagtgtgtcaattttgcttatcttttttaaaagaaaacaacttttagttttgttaatcttttctattgtttctatagtgtcttgtttatttctgccttgatctttgttatttccctccttctgctaagtttgagcttatttcaagtgcctcgaagcgtaacattaggttgttaatttgagatcttcattttttttaaatctttcacttccctagttagctgtattcctatgtattttattctttctgtggcaattgtgaatgggagtagtttcctgttttggctgttggcttgattgttgttggtatataggaatgctagtgagttttgaacattgattttgtatcctgagactttgctgaagtcgtttatcagctgaagcaactttggggccaagattatggggtttcctagatatagaatcatgttgtctgcaaaaagggacagtttgacttcctctcctcctatttggatgccctttgtttctttctcttgcctgattgccctggccaggatttccattactatgttgaatagaagtagtgacagagggcatccttgtcttatgccagttttcaaggggaatgcttccagcctttgcccattcagtatgatattggctgtgggtttgtcatattcagctcttattattttgagttatattccttcaatagttttatattgagagtttttaacacaaaggaatgctgaattttattgaaagccttttctgcatctattgaggtaatcatatggtttctgtcttcagttctgtttatgtgaagaatcacttttttttttcttttgagatggagtcttgctctgtcacccaggctggagtgcagtggtgccatctcagctcactgtaacctctgcctcccgggttcaagcgattctccttcctcagcctcccaagtagctgggattacagagatggggtttctccatgttgaccagtctggtctcgaactcctgacctcaggtgatccgcccacctcatcctcccaaagttctgggattacaggcataagccactgcatccagccatgaatcacatttattcatttgtataggttgaaccaaacttgcatcccagggataaagcctacttggtaattgtggataagctgtttgatgtgctgctggattccatttgccagtattttgttgaggagttttacattgatgttcatcaaggatattggcctgaatttttttttgttgttgtagtatctctgccaggttttggtattaggatgatgctgaactcatagggtaagttagagaggagtcactcctttgcaattttttggaatagcttcaataggaatggtgccagctcttctttgtacatctggtgaattctaccaaacatgtaaagaacaaatacaaagcatactcaaactattccaaaaaatacaggaggatgggtggaagaggaggaacttccaaactcattctacaaggctagtattacacttatactataaccagacaaagacacatcaagaaaaggaaaactacaggccaatatttctgattaatactggtgtaaaaatcctcagcaaaatactagcaaaccaaattcaacaatacattaaaaagatcattcaccatgaccaagcaggatttatcccagggatgtggagagataacacagagaaagaactggttcgacatatgcaagtcagttaatgtaatatatcatataatcagaatgaacgacaaaaatcatatgatcatttcaattgatgctgaaaagcattgataaaattcaacatcctttcatgataaaaaccctcaaaaggctaggcatggtggctcatgtgtttaatcccagcatttggaaggccgagatgggcagattgcttaagtccaggagtttgagaccagcctgggcaacatggtgatacaccatctttacaaaatatagaaaaaattagctaggtgtggtgatgtgtacctgtggtcccagctactctggggtctgagatgggaggatcacttgcacttgggaggcagaggttgtggtgagccaagatcgcaccactgcactctggccttggtgacagagtgagactctgtctcaaaaaaagaaaaaaaaaccctcaaaaaattgggtatagaaggaacatacctcaacataataagaactacatataacagactcacagcctttgctgactggggaaaaactgaaggcctttcctctaagatctggaacatgacaaggatgcccactgttattcagcatagtactggaagtcctagctagtgcaatcagacaagacaaagaaatagaagacagtcaaattggaaagggagaaggcaaattatccttgttggcaggtgatatgatcttatatttggtaaaacctaaagactttatactcagaaaaaacaaaacaactgttagaactgatacattcagtaaagttggaagataccaaatcaacgtacaaaaatcagtagcatttctgtatgccatcagtgactaatctgaaaaagaaatttcaaaagtaaccccatttatagcagccacatataaaatgaaatacctatggattaaccaaaaaagtgaaagatctctacaatgaaaactataaaacactgatgaaagaaattgcagaggacacaatattgaagaggacacatatcccatgttcatgggttggaagaatcaatattgttaaaatatccgtactacccaaagcaatctatagattcaatgcaatccctatcaaaataccaatgacattcttcatagaaatagaaaaaaaattctaaaatttatatagacccacaaaagaccctgtatagccaaagctatcctgagcaaaaagaacaaaactggaggaatcactttacctaacttcaaattatactacagagctataataatcaaaacagcatggtactggcataaaaacagacacatagaccaatggaatagaatacataatccagaaacaaatcgatacacctacagtaagctcattttcaacaaaaaagccaagaacgtacattggagaaaggacagtctcctcaataaatggtgctggggaaactgggtatttatatgcagaagaataaaactagacctctatctctcaccatatacaaatcaaatcaagatggattaaagacttaaatctaagacctaaactatgaaattagtacaagataacactggaggaaaatctccaggacattggtctacgtaaaaatttcttcagtaatatcccgcaagcataggcaaccaaagcaaaaattctcaaatgggattacatcaagttaaaaagcaaaggaaacaatcaacgaagtgaaaagacaacccacagaatgggagaaaatgtttgcaaactacccatctgacaagggattaataaccagaatatataaggaactcaaacaaatctacaggaaaaaaaatctaataatctgattttaaaatgggcaaaagatatgaataagcatttctcaaaagaagacatacaaatgaaaaacaggcatattaaaaggcgctcaacatcattgatcatcagagaaatgcaaatcaaaactcccatgagattatcatctcaccccagttaaaatggctttcatccaaaagataggcaataacaaatgctggtgaggatgtggagaaaaggaaatcctcgtacgctgttggtgggaatgtaaattcgtacaaccactatggagaacaatttggagatttctcaaaaaactaaaaatagagctaccatacagcccggcgatcccgctgctagatatatacacaaaagaaagaacatcagtgtatcaaaaagatatgtgcactcccatgcttgttgcagcactattcacaatagccaagatttggaagcaatctaagtgtccatcaacagatgattggataaagaaaatgtggcacatttacacagtggagtactatgcagccataaaaaagaatgagatcctgtcatttgcaacaacatggatggggctggaggtcattaggtaacatgaaataagtcaggcacagaaaaacaaacttcacatgttctgacttatttgtgggagctacaaatcaaaacaattaaacccatagagatagagaatagaaggattgttaccagaggctgggaagggtagtgggaggttggggggaatagtgggggtggttaatgggtacaaaataaaaatagttagaaggaatgaataagacctcgtatttgatagacaaacaggatgattatagtcattaataatttaattttatgtttaaaaataactaagagtataattggattgtttgtaacacaaaggacaaatgcttgagggaatggagaccctattttccgtgatatgataatttcacattgcatgcctgtatcagggtatctcttgtactccattaatatatatacatgtactacgtacccacaaaagttttttaaaatacataaatttaaaatccctttgttctttgtgtttgttggaaattcactgatgccttgtccctgctgtttctcaagcagggtgacttaagagtcaagccctgcagcagggactatatagtcaggcactatatgtgtggtacaagtccctgtccccttgggaagaagctgggagttgaaattttctcccgagtttaaggcactgtgcccaaggtagggttagtgcatgaatgtatctgccttttttctacccattttgttatggatatttgctcagtcacccagtgtgcaggagtctttcaactggattccagctttctctgaagagaattgatccatgtgtaggtgtttattcagtgtgtctgtgggaggagggataagcaggagcttcctattccatcatgttgctgacatcactctagactttccatttttttgccctgtgttataactgggagcctactagaactctctgaagtccaccttcttttctttcttcaaggcgttaggtcttaagatagttttgttcacacaggaggatgagcacttctgggatgcttcgtcttttctacatgagtgttttcttgaatcagaagatactctgtctgctttactagtcaggggcagggaatctaatttctttcaacttttatttgaggagtcttctactatccaatagaaatcgtttggcaaaacttccccaggacttttaagtacatttatttgatcataattattaagtggtttctggaggcatccttttaaataagacctccctttatttcctgatgttttgttcttccacatttaaataatcgaaactatttgacactgtggtgataaattctttgttatttggtaaggaattaacaaaggcgaaggatgtgtctgtgttgatttgatgttctttgagatcagaggataaaaatttggccttatggatcttttgcttacattgcctgatataattctggaaaatcaaaaccccgtaacagttttttaaaactgggattaaaatgattttaagagaagcccctttgttttaaaacagtaagagtaatgcagagtgaagaaaagagtaaaataaaaatgaaaatgttcaagtcgattttcttagaagttttgcttaagatggcagtgtgatgagatcttaaaaagctacaataaaatcataaacactagaagccatttaatatatatgcgataataataaaagaaaaccccaggattctggaatttaataataaaattaaagcagagattatctggcccaatttattcttttaaaactgaggaaactgagacccagaaaggtgaagggactttctcaaggtcacaaaattatttggcagagccaggacaaaaatgcaaaactcctgactcccagttcattatatttcccctacagcatactactttctaagttaaaaaaaaaaaaaaaaatcacaagaaaccacagagagtccgaagcctaggctaggaacttcaggggttaatgcaccttgcccaggatctgcgcaatttgtagaactgaggtgagatttcttgagtttgcagaagttaaacattctcaacaagagaagcttggttcaactccgatctcagggggattagagtaacatgctgagaactcttaggactttgctacttctactggttcacacctcagcccttagatgtctgcatttttaactgagttgaccatgggaaccaactcatcaggtcagaatctccaggcagttggccaacccccagtcagtggataggagcagcccactggcctttcttctccatggccctgccatgatgttaagatataaatttggggccaggtgcagtggctcacgcctgtaatcccagcactttgggaggccgaggcgggcagatcacctgtggtctggaattcgagaccagcctgaccaacatggcgaaaccccatctctactaaaattacaaaaaattagccaggtgtggtggcaagcgcctgtaatcccagctactcaggagcctgaggtaggagaattgcttgaacctgggaggtggaggctgcagtgagccgagatcccgccattgcactctagcctgggcaacaagagtgaaactccatctcaaaaaaaaaaaaaagagatataaatttgggtcaagtatgatggctcatgcctgtaatcccagcactttgggaggccaatacaggagaattacttgaggccaggatttctagaccacctgaggcaacctagcaagaccctatctccatgaaaaataaaaaacaaaaaaatcagccagccatggtggcacatacctgtagtatctactactacagcctagctactcaagaggcctagttactcaagacggaggatagcttgagcccaggagttataggttacaatgagctatgtgctccagcctgagcaacagaaagagaccctgtctcaaaaaaaaaaaaaaaaaagaaagaaataagaagaaaaatataaattaaataatctgattttgctctgtatatggattccctttagcataaccagcttcatggggcaatgactacatgggtccatagtcctaaatagacagacaatcttttaataacctggttccccatacctttccagcttcatctcctaccatttatcctgcagtctacggccaaatccccagagcagctcatgttaccttggtatatataatctcatatacactcatgccttcatgccattgcaccacgttattccctctgcatgacatgcctttctacctctccccaacatctagactgaataagtggctgcatagatgaatagatggatgggaaatgaatgaaggaatgaatacatataatttaaggagcactagagaacctgctgacttagaggaattctagctcccattcaaaaaagtaaaattacacctctattatcttaataaatagtctcagcatccttgtgggccacaccagtcttgtgattatcacctatgaggtctatggcaaatagttaaaataatggttatgatactaaagttggagtggcaaagttggcaaactatttcttttgttttttaatgttatgggaaactaaaggttatctatataatattacttttactcacttgcattctgatatactatctttagtatgaaagcagtgaaattatacctagggtgcaggtaattgtgcataaccctggatacatcaataggaattcagcatatatgagaacccataattatttatgtgtgctgaaaaataaaagcctggaaactctgtggcagaaattaatattctatgttgcttcttctgactccttcttttttttttttttttttttattgttgttttcttttttttttgagacggagtctcactctgtcgcccaggctggaatgcagtggcgcgatctcggctcactgcaagctctgcctgccgggttcatgccattctcctgcctcagcctcccaagtagctgggactacaggcgcccgccaccgcgcccggctaatttttttgtatttttagtagagacggggtttcaccgtgttagccaggatggtctcgatctcctgacctcgtgatccgcccgcctcggcctcccaaagtcctgggattacaggcgtgagccactgggtccggccgactccttcttttaaaatgaaaatatttgtgtgctggggggcgggaataaataattaaaatacaaaaatgaaaatggtctcagggcctgtttctgcccttaccattaatcacactttgataaaaagtagtttatcattagaagtatctataatttttagttagaagtgttttcctctgtgatagctaggttcagagttttgatgatggaagaaggctggaaggtaattctggaagcttggcacaatggtgcaagacagtgggcttagttagaggaatgagatgcctcaatgaggaacacataggcactgggtgaaacgtatgtcagttctggatgaaggccagaacaggcagagaggtctagaaaaagggagtcggagggtcccacagacaactattaactaccttgccatcttcctcctctcattcatctgatgctcattcaatgaatagggcacaaacccaaaccaatggcactaggctctaaacgctgatactaaacctctttggcatcactctccctttaagaaacttggccatcatggctttgtctgcctaggaaaaatacaaaacaaagcaaattctaataatgcattagtacgcataccctgtatattttgtccacaacactcagaaaccaagctttagactttctagaggtccacagactccagattaagaagtctgtaatcgattaaaatttgcgaacccttcaaaagtttgtcaaggatttttcatatcattatgtcatttaacgacccaatcagtgaaataccgcctcattttactcattaggaatcataatttcactctggttcatcagaatatattctgtctttatatacatggaaaatatcttggagagtcaataactgatattagcatgcctctgggacacgagctaaggggggatataaccttttgcaacatttacattttttccatgcgtgatgtcatatttctttttgaaagaaatatgtcagatctaccactttcacctgtatttttatccctctcatgggtgaaatgatgagtacacttagaaaaatcagatatttccaaagtcttctgaaaataaaaactaattttatccaaatgtatatataattttaaaaccatgtgcctcctaatactagtcagataatttgtgcataaattatgcattttaaaagtgagtttctttgcaacatgttcacactgcaccttgctaacgcatggtacttatatctgtcacaaaatgttttattgggttgtcacaaatgttttattgggtttccttggccttttacttgtaaattgattttcctagccttattggaccatgtggttttataccaaatattttgataaatactaaaataaacaaactttcatttcttcattctccagtcccaggcagcatttagccaaacccccacccctgctgccaccacacacatgcatgcacacacatgcacacacacacgcacgcatgcacacacgcacatacacacacacacgcatgcacgcacacacttcaactacttctctgaatatgctgctacaatttttagataaatattcagtatccaatgttggcaaatgctttttgaaattcgaaaccttgaagcgcaagatcctcattactttttttttattttaagccttcagatgaggatgatgaacgtttgataaacccttaccattcaaaataacttgaaataaattattgtggtgaccattacaatgccctgaaattcttgatttcacccttgacccaatgctaaaaatgttttagcattttccactaaaaaaaatggaggaatctgtttcataaagaagatggccaaagccgcataactctttttaactctgctggactctagcttttgctagaccacgtgcttggtctgtaactatagttgtttgagaccccaaagtcctggtgctgccctaggagggtgaaagcaaccattggtccctgcagcagagttctccagggactgctgtcaacacaactgcagtcagatgatgggactcaaacttttgtcaacaccatccagcaattattctgaggagattccttttagtaactaaattgaagtttaaaaaaagtgtagatatgtcactattctcatgtagggcaatccttcaagggaaatctaggttatttgttcagtgttgatagtgaatgagctgagcagatcaccccaaatattacagaccaaaggctctacagaaagcaagtgggctggagccacgcaccacacagacacgttgggtcaacaggaattgaagtcagaggttgtatagctaagttgtggcaattcctactcctactagctagcagtgggcaaagtccttgaaacagtatgagaagcagctcgctgatttgaaatatgagtaagaacagcagagcttgtaagatttaaatgtctccaatgaccctccttacaccaacactggtcatcaaactaaaccaggaactgatcacctcattcccttgctcataaaccttcagcattgcgtacaaggccttccgcatatcaacctatccctcagcccctacgtcttgccttcctcttctttctcttctgcagtacatccattttttcacatgattgtgcccaaatttttcagctctcaatctctctccctggaatgccccaagattgagtgaaatcctactcaatcttcaaaacccagaccaaatgttaccttcccttatcccatcttcctccctgccccaacttagttggtcattggcacttcagcaacaatttgctcatgtgcctgttatagggagcatcacatttttattgtaattatctgtatctttatccatctgcatgctgggctatgataattctagggcaaagataaattcttatttttgtttacatccctgtcacccaccaatcttaatgatgctcaggaatgtattggctttatatgtagaaacctgagtacataaagatgtttttaaactggaaagtgtcattaaaatgcagtaattactattactgaaggtggagaacctaaataaaaggagaatttagtctcagagttttatacttgaagaaactggtgttacaatccttctaaatatagatgctacagatttttctggagtcccacagggtagaaggtgggtgcactaaggggtgacacccttaaagacataaagctttacccttcatcatggacctgcactgatctatagaactgtatcatccctcagacttactcaaaatgaaaacttacaaacctgtgtacctccatgattccttctctacaactgctgttttcgtcacttttgagtacatgctgaagtttcattaaactgtgtgagaaggaggcactggattttgaacccagacagacctgggttcaaaatctggccctcgcattcattcacagtgtgtgctctcagtctggcaaagccttaacttcacctctaaaatgagaaaaatacataacatggttgttgtgaaaatcaaaggagaaaaatgtggaagaaggtgtcacaaagtaaaaatgttatggaactgcaaggtgttactcttgtaatgagaagtagacagttagccccagtctgcccttccttggttgcttcatcccccatatctctctcttggattccttgcagaagaagcagtatgaatgtacatctggctgggcttgggtctgcttttgcctgacggagtatttgctccaatccctaataaggctgatctactttattctctgcaaaggggaaacttttcttggggaaataacagtttcagcagcccctgtggtaacagagtatttctttgatctcttgccactatctgagtgttgttttgaaagttatttaaggatgaaagcatccccaaaaaaacctactgtcaaaggggatttcagctcacctcaactccaaccaactctgaggtttcaaatgtgtagaattgagatggtgacagctacataaatattaaatgagcaatgagatgccaatgtttttattactgtttgcaattgaactttgagtaaagctgagacccgttacatacacctggagagagagcatggcttttgatatgaccacgatatatgatttggaaatttttaagtatacactgttgctaacagctcttagttaaaaaaaaaaaaaaaagtagctgaactccagtattcagcattcctatgagagcttgtgatgctgtgatgccaaatatttgggtttacatagaaatttggctcacagatgcctcaatgaataggaaaaggtggttttggtgggtaacaggaagtcaggaaatttcctccccctcacaaaggtggagataatgtccacaatttaactggtaccacatctgacatatatcattgcaccaatgtctttctggtctctttaactacagcattgactctctccaattttcctcctacaaaatataagagaaattttcctaaaatgcaaatctgatcacataatggctgatctttcaagagctccaaaatgctttcaaataatgttgatacttcttagcataacctgagctcctgtctcctgtcccatcttatttctaaagtcacactcccatctcacctcatctcttctcctgttccttgtaattgccttgcaattccccgaccacaccatgactccgtgcctttgcacacacagcaacctctgcctggaatgcctttagccactctttcctatacatccttcagaagtctgccaggagccagcctgtctagcaagttatccctaaccactccctgccagactgtttagggtgaccctaatctgagcctgcctctatcattactctcatcagattgtattataatcttaaattgacttgaccgtctcgcttcccaccattgtactgttactgtctgtaggataagatttgagctttgttcatatttacatccccaggacatttccttgtccctagaagggtgtcagttagagtctgatgaatcagtcagccaatcagcacactatatttaaagttggatttgatttcttatcctgaatgtaccagcaattagcttggaattgagtatttgaccaaaagatacaaaattcaaaaaattcaattatgtttatttggaagctattatgtatatttccctccaataagtccacataattctctttcctgtctatgggccaagtaccttactcccaagatttaatcctggtcaatgaccttcctgtcccaccttggttactttagaatacataaaatttttcaaaatctgaagagttcctttctttcaaccacattctcctccccacagtcagtgacctcttttgaatatttccaaatagcagtcttgttcttcctgttcaactgtcaatgtgacagtctttactaattgaacaactgcattcattcatttaagacacctttattggatacctactatgtgccagctgctgtcatggaccaaagtaaaaggcatgcatgagtcaatctaccagttaagcagatgagctggaaaatactcaacattatgcattttaggtcaaagctactgttttaactgtgttttgtgaatgttgaaaatttagagatattacatacaagcagatatggagaaactaaaggcaacacacaaaatagagataactacagcactttcccaagaaaagtaactaggtccttcaaataccccttgctaggatatgcaatgtatgttgagatgtttaacctttcacagggttctgaaaaaaataatacatatatcttgcttataacataaagggtattctttgatctgctgaagcctacttgagaatcccccaaaaaagaactcccatgtgaccttatggagatttatgtctcaacatcagccagtctgatcatcacaaaagcagaagctgagcctgggaatggagaacaagactctttgtttccctgggaagctgtggaagcttcttgacttgatgggaaaaatctgaagattgaatttttcaggatcagtaaggcaccttgttgagtaatttacaggagaatgtgaaaacaaatacagaagaaaaaagcccaaaatagcacattctttttagtgagacacagagggaagaagactggggctggcctcccaagaaggtctggttttttcttttttatttatctttaattccccacaaattcctttgggtcctgaggaaccgctgctacttcggagttgctttgttcccaagtcttccatcctgtctctcaccttagcttacatgtctgtagtcagaagagagagaaacaggtgactaaaagatatgaaccttatccagaactgggagtgctcagagtaggctcttagagggggaggaggagaaacacttggcaccagtaagactccataacatgaaccaggctccagttatgggccagcaatgtacacgagtcttctgtgactgtttacattgctgtttattttttttttactcagtacttatcttggccactattgccacatgtagctgatatgaacatacagaacacctttatgagactcatagactcagtacaaccccttgttctgcttggtggtcactgcccccaaccctctctccttcttgaaatgcataacaaggaaatcacagtattagagacaactctggcccctggggaaaggggacagaggcgccaaccaggagtccctgccttaagttcagtcagcgaaagtccaatatctcacagactgtctgagctttacatagtggagctttctctagccaaagagacctcaaaatggctattaatccatttattactttctccccatatggatttgggaggcagataagagagacaggagtttgaatccagcttctgcattgataggctgtgtggatctgagctagttatttaaaagttttgagtctcagtttcctcatctataaaatgaagagaacattacctaccacataggagtgttaggaggattaaatgaagtatttatggccaggtgcagtggctcatgcctgtaatcctagcactttggaaggccaaagcaggtggatcacctgagatcaagagttcaagaccagcctggccaacatgatgaaaccccatctctactaaaaatacaaaaaattagccaggcatggtggcgggcacctgtaatcccagctactcaggaggctgaggcatgagaattgcttgaacccgggaggcagaggttgcagtgagctgagatcgcaccactgcactccagcctgggcaacaagagtgaaaatccatctcaaaaaaaaaaaagaaaagaaagacgtatttataactaaagcacaaggctccagtaaatattaatagatggtctcccagcatcctccaaagattactgttagctccaataaaccattgcagttttgattgtttcaggatttattttttttactgttcaccttttgtgacattaattatatgctatatcttaaaagttgattacttttcaaataattggagctttttttcttttttttttttttttgagatggtgtgtctcattctttcgcctaggctggagtgcagtggcacaatcttggctcactgcaacctccgcctcccgggttcaaatgattctcatgcctcagcctgacaagcagctgagactacaggtgcctgccaccacgcttggctaatttttgtatttttagtagagatgcggtttcaccatattggtcaggctggtcttgaactcctgaccttaagtgatccacccgcctcagcctcccagagtgctgggattacaggcatgagccacagcaccggcccatggccccttcttaaaatgtgctctcaaccagcagactgtagatgaggtgaaaaagatgctgcacacattatggtttcttgggacccagctgacaaaaagtgctttttttttttttttcattttgtcccagaaggagagagaagtgactctcattttattcattcaatagctgtttttggaactattactctacagatgttggccactgtgagggatgcaaaattgagttaggtgcagagtctgcactgaagaagttccagggaagataagatattcctttaacacaacttttttaaatgcctaccatgggcagatcctcttgtatacagtggggtaaaaacagatgagcccatggatctcacattttcttaagttaacaagtaagtaaagaaagaaaacaacttcagatagtgataagtgaaaaaaataaaataagatagtgtgttaggggagaggcataaatgggcttggtagaaatcacttactaagtttgagaaactgaaagggcagatgaagcgaaatggatagaacggtagaaggggggctttcaaagaaacaagcaagacccagatcatgatgccttgtaggccagagcttagcaaacttttcctgtaaaggatcagatagtaaatattttaggctttgcaggttatatggtctctatgccaactattaaatccttccattgagacaatacataagccaatgagttgaatttaaatttcatataattttcacgttatgaaatattttgctttttcttcaacataaaaaccacttttagctcacaggctatacagagacaggcagcaggctggatttggcctacagatctcagtttgccaggtcctgttgtagactatgttgaggagtttagattttattccaggtgcattagagaaccagtacaaggtttctatgtaagaaagtattgtgataggatttatgctttgaaaagattgttccagtgtcattggattggtgggggtatgaataaaggcagagagactagctcagctataaaactgttgtaggagtatggatgtgaaacaatagtggcttggattagggtaattatagcaatggagtttaaaaaattaataggaggccaatttgaaatatgttgtgctggtagagttgaaaatgcatgcacgtaaatcattataatatgaagtagagtatataaatgccagaaagaatgacagttgaaattattctggaggaccagagagaatgacctgaagttgatggaccatgagtctttcacttgagtaggtttttgacaagaagagaagggagagtcattttgatgttggaaaatattggtcctcctgttttcatctgtaagaaatggaccatgatattaaaccgtaagctccttgaggtcagagatcatgtcatttgcctctccataaccctacaacctagctgatcaataatctaatgtcatttgtgatacagatgaacctggagggtatcatgctaagtgaaataagccagatgcagaaaaaatagtgcatgacttctcctatatgtggaatctttaattttttaaaaaaggtcacaaacagaaaaagagggtagaatagcagtaaccggggcagtcggatggggagagggaaaatggggagatgtaagtcaaatggtaaaaagttatagttaggtagacttcagttagtaatactgcattgtctactaaaaaaaatttgctaagagggtagattttgatgcttttaccacacacacacacacacacacacacacacacacacacaaaggtaactatgtgagagatgaatatgttaattggcttgactgtgtaatcatttcactatgtatatgaatatcacaacatcatattgtaaaccttgaaaatgtaaaggaaaataaaatttaatggcaactgctaaaaaaactaacatcaattccaaaagtatttattgatcttctgcatgctatggcatatgctagctgctgaggactatagtgccatataaagttgacatagtcactgtcctcatggagcttatcagaattaaagagataattgcacaaatcaataattactgtgctacaaaggaacagtatttggtgctctgagaggatataccaggacccaatgttgtcttggggatcagagaagggttccatgtagaactgacatttacattgatggctgaaggaaaaggaagaaataaataacgaaatagaagtcggaggtcggaagaaagagcatttgcagcaaaatgaacagtatgcgtgagtttcctgagacaggaaggagtctggcatgtttcaggatctaaaaaccagagacagaaacaaaacaagtaagcatgatagaaccaaaactagcagatggagaaggcccagaccatccagaccttgtaggccaggggaaggatcaagaacttccagaaatgataggggagttttgggtcgaagcagacctagctttaattcccagttatgccacttgttaaatggatagaattactaaattactgacctagcccatctttcaggaattgtgaggataaatgttaaaattatttattatgagaaataatgatgacattttctgtaaaagaagctggtggattttcattaaatggtttctcctccctgggcacagggtaaatgcagggaataatatgacctaaggctcagaaattagcttaaatgctcagcaaaggtatccctattttgtggctcccagggagcaaaatggaactatgaagattgtcctccccatatctatgtccacacataagtcaaacccactcaatctgagccccgattctgtacttctacaagagaaagtgggtgtccaaagatcaatctggcattgatcctgtcctcaaggagtttaattcattgcttaaaattataaggaggaaaatgggatcttttcaatggatgaggtaagtgaataaaagaaaagtcagagtgcccctttctaaatgaaggctcagcatctggcaagaaagttgaactgtttttgcttttgcccccgtggctagtgattttaatttcaggaatgcccaacaggactcagaaagctgtgaatgtaaactgactacgtatcttggtctttgtgtgtgtaaatcagacagctaatcctgtgctctccttgctctgttcctttaggaatgtaaaatagcttgctggagctctctccatgcaagcaacatgggtatggctctgctgaaaacaaaacaaaacaaaaatgtcagaatcccaggaaacatctccaggagagctcttggcctgtggaagcgctgtcagaggctgccacttttcaagggaggtgtggtggggttagcagcccaagcctgctgatttccaattgtcactgggttttaaaagagttcttgctattgttcagttacatccattacagttttttaaaagctcatacttttttcatgaacaaaaattatcaggacagtttctcctaaaaaactagtctaaacaagtgacgatctatctggacatcttactcaaggatatggcagggtttcaaggaagaagagaaagtagaagagtttgtctgagttagtgatgtgactacttttagttcagtgtcctaaaagtgcttattcacaaggtccagacaacatgaaataaaatattgtaataatgtataataaaatattactacacatagtaataaaatgtaataataatgaagcatggttagtcctgttcaggcgtaatcttttatgctatcgggagtagcgccctggtatggcctgccatccataagaacagcaattagtttgtcagtccatgactgctgccctggttgctcagtcaggtccacagatgcccaccctgcaggctgtgtccttcacgagtttctgggccagccctggcttagacaagagctaatgcagggaacctggactcttgtactgcccaggacctggagcctggccactgcacagacctcccaggtggtgactgcttggtaactgaccttctgccccagattccctcactgtgccactcctgtgtcctaaagggatttgagtacctcattcttgactcctgatgtcaggatgttacctaaattatgcccaagaagtctacacccctcagacagtcattatacctgctgatcatgatacatccaccttccaaaatctgcttgagcaatcatctagcatttatacaatgatatgatggtaaatgcttaacaactgataccctggagaggaaaaatctatatatatagattatatgtgcatataattatatacatatgcgtataatcacacagacatatatatgcatataagtctattgtaaattttactgatagaatgtgtagcacacaattcacaaataataataaaacacacaatactctttattgtagattctttatcacccattgattctatcaaaatgcttttatttttgttgaacttttgaatctgcagccaaatggtggctgcaattaatggaatggtgcagtttccatgtaaatgttggttgctatttttatttacctgaaggaagtaaaacaaaaagcaacaaagacctgttttagaacttattcatcaatgacataagcaacttctttgttgaattaaataatagtttttgagtattagaagaatatttcctcaattttttgtgctatttaaaagaaaaagaaaagaaactgtgagatatacatacatactatatatatgtatatatatatgatggaatactactcagccataaaaaagaatgaattaatggcatttgcagcaacctagatgagattggagactattattctaagtgaagtactcagaaatggaaaaaccaaacatcgtttgttctcactcataagtggaagctaaagctatgaggatacaaaggcataagaatgacacgatggactttgagactcaaggggaaagggcgggaagggggtgagggataaaagaccacaaatagggtgcagtgtatactgcccgggtgatgggtgcaccaaaatctcacaaatcaccactgaagaacttactcatgtaaccaaataccacctgttacccaataacctatggaaataaaaaaaaaaaaactgtaacagtcacagaaatatttagtctgcattattaacattttctccatcacttttttaagtctcagccagtggtcagcaaatttctctgctgaggcaggagaattgcttgaacccgggaggcagaggttgcagtgagccaagattgtgccactacactccgtcctgggcgacagagcaagactccatctaaacaaaaaaaaatttaggtaagagccataatataataactattaggagagcaattaacaagcaaatggttcagactatggaggagactttttgtggttacttgtagtgcttatgaatttttcaaaatcctgaaaatttagacacctctgctccctacctgtatctgtgtgtagctctatcatatgataagcaaaactaggagagtacacgatatatgtagagaagcacatattatttttgtggatggcagaacctgccaataaataagtgaatctagccttctgattccaactttgctttaatcttctagaagtagtggatgcaagaaggcttttctagtgtcaaaaaaaaaaaaaaaaagaagaagaagaagaagatgatgatgaaaaagccttttgcccttaatttaaatcattgtttttctagggaaatttaatttggggaaaaaaaatgtttttctaattaactggatgactgtgtgctatgcaaacaataaagattcttgtttgaaagtaatgcatgcccctgttcctaagactaccaagggaatttaaaataaaaaatgcaagcagctccgacctcatattttgccagagctaaacagaattcccagatccagagttttcacgtcagttcctaatttaaaacccacaagtgttgagcgggttcatgctgcagcaagacacatcttctcatctctagaaatgactgtatttgatctcggtctgggtttctcggcacgtccttctctctctctctctcttcttcttgtgctatggttggcctgaaaggttagaaactgcacaattagatggatcgggggaagatttcataatgctctggtgctgggttgggcagtctagccaaattccgttcattagctaaggcgccagggtgaatgtggccagtaagaatgctgttttggttccatcgaagagctgatagggaataggaaatacacttttagtttttttggtttctgagaggcagtatggacaagtgaagagtccaggatgcttggaatctgaaggccagttattaatctccatttcaaccactaactgagcagtagaagtaactgccattctccttttgacttttttccctccgttctgacacagttgtcttatgctgtctgtaccagcgtgaaattcctgtctaccgtagacttcaagcattccaaagtcaagaatcaagtattcaccaaacatttactgagccacctacactctgctaggtgctatgataggtgctttggaaagtgatattaatcagacatggtccttgccctaaggagcttatagactacagaggagatggatcattgaaaaacataaaacaataaagcaagtacaatgtgtgagacatattaaaattgctaagggaaaattggcaaggatgattcccttgggaagccagagaaaactagaaaaaggaaaggactttgaaccaggactgtttgaataaaaggatagaagtttttgtggaagaggaggccatatcacaggagaaaacagcacaagcaatggctgggtctaagggcaagtgactgataaggctaagtggaggatttgggtgatgtttggttaagacgaaggaatgtaacttttacagtatattcctcccgatgtgtgaacaggataaaacaactctaggctttgaggcatttgagattttagggagaatctgcacaacagcaagttttatgaggtgttttttttttgatcaattgaataaaaattaattaggcattgctgcactgttttatctttatgcctttacattagcatagtttcacctctccaaaagctggcctgcaatttgagtgttttcagctaaaacagggtggattatctaatccacatcataagccttgaaatttacctaaactttatactatgttctctgcttgggtacccaaactcttctgagttgtgaattttctagtcttgtaactgattccgtgacatttcccattacattatagacctcagggtggcagggccaggcttcaggggctctttttcattttaatcttccagcctgtgatttacatagctgccatcagataatggcagtgttcaggtagaacttccctgcccaaatgactctacatatctgaaacctagataaaaattaaagttttgttaaaataacaaggaatcccatgtaaaatagtcatagttacttgatataaatacaaggaatcacagtgtgagccagagccaaattttaggaaatactaatatctaggttttgtcgaatacctttcttgctaattttcaactgctatgagccattgcgcaattaagccctgcttttccttctcagacctaagtagaaacagtttctctcatctttatcttaaacattacaagttttgtatagttttagaaccggcttatacgtgattttctcagggttttaatggtaagtctgtaaactacctatatacaactttccaaagagaacattctgagttaaccttcttagaattcccagttgcggccgggcacggtggctcatgcctataatcccaacattttgggaggctgagacaggctgatcacctgagatcaggagttcaagttcacgaccagcctgactaacatgatgaaaccccgtctctactaaatacaaaaaaattagccaggtgtggtggtgcatgcccgtaatccgagctacttgggaggctgagacaggaaaatcacttgtacccgggaggcggaggttggaggttgcagtgagctgagatcgtgccactgcactccagcctaggcaacaagagcgaaactccatctcaaaaaaaaaaaaaaaaaagaattcccagtcactctcaaagtgactcctgctcactctgtttccctcttcattctttaaatgcccagaaattcctttcttctttctgtggcttcatgccaaaaggagtccaccaacccaaggaaatacacagagggaaaaagactgttggttgccccagaatagattggccattctaacatggagaattgtttgcctttgatgtgaatcttctttttctctagccccttcccttttgaaactcagatatgttataaaatctaattagacttaactgtttaaaaccctctattaattcccaaaacagaaccacatcttcttacaaccggcttctgtttatgttttgttctgcaagaagcctgacactcttttccacctgaaacttgctttgtaaaacatgtttcagtaaaacttgaacaatttcaaaaataaattgaggtttctttagaaattctaaagatcgtatctctgaaaaacttttcattaatcatttgccaaataatctggtattattcccactaatcccttgctcttcttttggcaagttgtcttgagttcttagtctggagtcacagcccttgattttcagccttcagcttagagctccaccacagcaattaatcatgtctgtttcaatggcaaccaaagatatttttgtttccagaattttcctatattctttgctcttcctaaatttctttgcaaatttgctactcatttttgttttgttctgtttgtaataacttactcaagcataccgtttttcttctatagctaaattaggtgtaacattattctctgattacaaaccttccccaatttgactttcagagacttggcttcttcaagagttagtagctcgtaagtggaataaaacattttgaaaaatggaaacatacatgtaatacatatacatatatataaacatatatatgtgttttagaatacatatttgtaaggaggtatagaccgatttgagttaatatataatcttaatcatttgattctaactagatggtataacatgcctgagagtttcaaggggcaagaaactagaaaaggagaagattcacatgaaagaaaaatatttttgtgttggaaaaactaatctactgtaggtgtgtgtgtgtgtgtgtgtgtgtgtgtgtgtgtatacatatatatgcatttgatttgtaagtatttaataagcaccttcaatgcaccaagcacagacccacactagaaaggaaaaaaatgaatgacactttcctgttctcaagtttctcatgctcaagagaaagagatacatagcgtaaaacataatacattataataaatctcgtttttacagaaataagggacttagggagcagaaaaactggtgtatttgattaattattcctgatgaatttagagatgactttgctaggtcctaaatgattggtgagtttcaccaagcagaggttggaagatggggaaaagacacagaagcagaaaatgcacaaaataatcaggtaacagagacttacagaacaaagactttcttctgaaaaatggcaggaatttagaagagtaatatataattgggaccagataagaaggtccttgaatgccttcctaagatttcattttatttcaaagcaactggactctatgaaaagatactaggtggaggaataaaatcattcaatcttcatttttcaactataattcagggtatagtaaaaggattttttttcttgagacaggatcacactctgtggcccaggatgagtgcagtggtacaatcacaactcactgcaatcttgaacccccgggcttaagcaatcctcccacctcagcctcctgagtagctgggacagtaggagcatgccaccactcggaatgggaggcactcaagtagagattaacagaaggaagttcgagctcaagggggaggctggacatagaatcacagttttaagactcatagttagagccataaaaagtggataaagtcaataccaaaggcaaacatgtggagtgaaaagagagccaaacatcaaactcccaaggaacatcacatcaaagggagaaggagaaggggcaaaaccaggacgagtctagaaagaggcagttaatgcaaaagagaagtagaaaggcaagtgcaaccaaaaccgggggaggggaatggttgcacaaagtaaggaaggccaaacatggcaagatttcccaaagggaggctgttgctgatgatcaaagcacaagaattttaggagagcagtttcaagagtgtgaggaaagcaagcgagatgcccaggaacattctgaagaagaggagagaatgcaggatcatccagagcaagggaactgtgtgactcgaggggcgcagcaggctttggagatggtttgattttgaaatattaaagtgtcctagagaatgtcatttaaatcttaagatctattgcttatcacaaagtttagaaacagaggccttgcttcccatgggatttaagtcccttaagtccctgcttcatttatgcttgccttaaatcccaccaggtataagcaattacttaagatactttttactgatgatgcacaatttatctttcctgaccatggctttgtcaactgatagaaaatgtgatgaaagcatatgatatcacagtaaaatggggtgttagaatttgtatgacttaactagaaataaacattcaccttggggatgtcaagggagaagaacattaaacaccttagccacaaaccccttttccaatgaaaaggcttggaagaagctatcaaggagaagaaggagagaaggggaagggagcagtatataaggcattaggggaagagaatgttttcagaaaaagaaggtgtcaaatgatgtggagataatgaaaggaggcttctttatttggagtgaaaatctcactcagaccttaagagaggcttttcagtagaatatggcgaagcagatgtcagacttggagagcgaatagaaggtaatgtcctagtggatcctttggttctcaaatgcagtaaataagttatctactatatagaacaagctgttacatgtaatgtgcctgagtatgtgtgtgtatattcatatacacatacacatacacacacaaatgcacacacacacaatgtgtttatatggcaatggtctcatgagcaatatatttaatataacttacatctgacattaagaacatcacataaatgtgcatgtactacaatatacattatatttatcaaggctcaaaaaaactgataagtttttattattcttttctgctcttcttttaaaaaaaatgtgaacttggaaactaaattaacatctcaaggaatgttgtctgatacaccaatataaagaaaggagggtgcacttaactctttctgagagggattgtatgctagagtttctatggtacttcttgatgtgtgactgaattttattctccctctttctctctctccctgcccccctactccctccagtggaatggagtatgtccgaagacttttctcctttggctggagaaatcatcatggataatctgcagactctgagatgcacaatcacaggacttacaatggtaaatgtccccagtagacttttcatttccctattgctgatatttgtgctgggatatcagtagcaaatgtctattctgaaagcaacagccaacgcccagtcctctggcaacaactgccactcattaagcatgatatgtctggtatctagaatctgaatttcacaaaggagtaagcagacagcatgaatcactttataaactgtcgtgttctaaggagatcagaaaaagactggcctcatgcaagccttgaaagctgctgctttctggatcacagtctaatcttctgggggaaagcagggagtggatcaaaggctctgagagatgcaattttgactccctgtctgatggtaaaaataacagcttcatctcaccctcatgcccacagcctcagcctcggttgagatcagtcatcaattgcagtcacataatttcctgagagaaatccttttcccttgattaaaaaaaaaaaacgaagtctgtctaaatatgttttcacaaaaaagaaactatatatggtggagctatgtttctcagcaacctaaactaatttaaactgtgagtgaaaaactggaacaaactgcttatttgtttaactaatataaactcaaaagttaattatttagaattatgaacatatgagcatatgaaatgcaaaaaaaataaaaacaccttgtaaatcagttcaaactggagcaaaccctgtatttcctcaagcaattaaaatgcaaaagataaaattcttttttctcaaaatattttaaaagtaaaattaaatcaaacctttttcagtccaattcaaatatttaatatcttaggaccttcagatgagggaagtagagggataattttgttattattgttgttgttttcttaaaggtttgttgattaaaatgttacctacaaagtataatcctaaagcccacccttaaaaaaaaaatgcatcaggttgcatttcttcaagtttaaacctgcttattctaatggaatttttgatgcttgggtaatcaccacggaatcctgacgtttagtcctaatcgcatatctataccaggggccagaactgtggattaccagagcaaacaaacccctgagtgggtggcccccagagatgctatcagtagaagactgattccaaccctatggctcacaagatggaagagggccagaaggaaccctagggaattttcattgcttaaaagaaaaagtgatatgtgataaaaatggaaaactctccataaagagtttctctaatatctgaactaatttccatagggattaagtttttccacttgaccatctaatgaaagaaatgcagacactattgtaatcatataaaagcctaggagtagatttatactttacacaatctctataactttgagggtcatagaaacccattttcaacattaaaacattgatttcctaacacagtaaggtcaatattttatgatccctagaaaagtctctacaaagatgtgctttttttttttaacttcaaacatcattttacaatttttacaagcaatgtttcatcaaatgctggcttctcaaatgccctttgggttcactggaaaaaaatataaaagcaaaatgtaaaatataaaaattcaagcaaaatataaaaactatacaaaagattttaaaacattatcagcaaataaaaacaattccttaattcttaacatcacaaaagaccattaaagaatataagccattgttttaacaatggctttaaaattgaagtcacatcaaaatgttaatttttttaaatgtgtatgcagctgaatgaaggatgtttattgcagcatgtttattgtagcacaaaatgtgggaaccatctaaatgtccaccagtcagggactggttaaatacatgataccgaatatttgctcacagtgaaatgtatgcagacacaaaaagagcaaggcagttatttaatgcactactctgaaaagatatttattataacttattcattttctaaagcaagttgatcactaaaagaagtgacagctattacctataggaaggggaaaataaggagaatgatgtgagagtgggaattgctattttttgtaaaccttgtagaactatgtgacttttaaaaatttatatatagtttcagggggctcaggaaaagtcattatgattcttaaattttgaaaagaagaaagtgcatagaaactaagagggaacttcaaatatggttgctgtgacatataaacataatagtcaagaaaaaccagaatgctatagatgggctatagttctgttgcccatgaactctgttgcatgggcaacagagttccaaagagatgaaggagttaatcacacatagttattaaattctatacccatagagtctagggtaaaaatgattaaataaaatgcctgatgcatcatttcaatactttgcagggccaacagtattttgttcaagtctcggcttacaatatgaaaggatggggacctgctcagaccacgacaccggcatgtgcctctccttctagtaggtggtggctgtgaactctctccagcatggtaacagactccaactgcaactccatcttcagggtgccattgccattcccttcccccactgcttgcaacccataagaccttctcagggcagcatctgggccacataatgaatgattcccctgcagaaatgctcctggggaagcagctcagtggagtaaaaggagagggaatttggaaacagaaaggctgaatttgatacccattatgcctcttatcatctgtgtggccttcaaaagttgtttaacagtcaggcatggtggctcatgcctgtagtcccagttactggggaggctgaggcaggaagatctcttgagcctaggagtcagagagttcgaggctatagtgagttaagatcgcaccactgcactccagcctgggtgacagactgagacactgcctctaaagaaaaaaacaaaaaccaagtctctgagactcaattccatgtctttagaacaggtccaaccacaccctttcatagggcttttgtggggatggatcagatgccatggtgggagtggcggcccagagtacatacagtccattgtagctctcctcttcccttcctcacccgcagtgcacacatccacatcgacctgataagaaaatgaaagctaacaaatcttactgatctgacactctgtcagaaaaaaagctttcttactaacagcattctgctacaaacccacaaacataatctatagcatttgtagtggtggctgagaaacccagcaaaggccttccgattatttgaaaattaattgtctatgccaggtatgtttgggcattctctattaaccagaaaatttaaccagaataaatatctccagacatatcataccatagatttttctatgtaatgagcccagtactctgaattgtattttcattttttaaaaacacttcattaatgtgagagttaaaagtgatatcatatgtttcttgtgagagtaaaaactgctaacatcctttatggaacacaatttgctatgttataccaactgccttaagaaaatctgtttctttttactccataattctacgtctaggactctaccctaagtaaaaagaaatgcaaacaaaccagtctgtacgatgatgtgtagcaatgcactcataaaatgaagcgtcatgtgtggtagggagaacaaatatccagtattaatttagtattaaagtatgatatatctatctttatatcagtaactacaaataaaacacaatcactaaacatggtctttttaaaaaaaattgtgtggaaaaaaacttctacagtgtaagttttatgttttatgtaaaaagaaatgcaaaatgtgggattttttttcacctaacattcaactgtaggtttgtacatgattagatagagtgtgtccatgtgtcttcataactctccaaatttatcagtggacatttgggttatgagattatggtctcttttagtttttttaactatgcctgtgtattttttttataataaccatttactcaagaccagccatgaatcaggcagtttgtaaagggctttcacattcagtatctcttaatccttgcggcaatctttcctcattatttctgtcttgtaactaggcatcattgtcactatcatctgcatctctatcagcattggagataacctttatcagactctttatatggagggcattaatctaagtacctcacatggattaactaatttaatcttcgtaaggtacctcttgaggtgatttttattattgggttcattttactgatgagggaactataaacatagaggcacatatatacagagcccagcatttgaactggggttcagagatgttgcctttccgaaagtcacaacactggtacatggctgaaccaggactctagcctgaattggtcatctggcatgtctccgatgctacagtaactagtgccctgctatcaggcagactaagagccagccatctgtgcctgactaccatctctggcagattcagataactacaccaggtcagacagggccttggaccaccgatgcctgagatccctaaggtccctgactctcctggcatttgatgacttcattattctagacttatttggactaggcatgtttttatttctagtcatttatttctagttgtctttttaccaaagatttgccagaaacacaaacagaattctaagattaggataaaaggaaccaatctcatgttggggatgggcagtagtgtgtgtatattatgggagtgacagaaaatgcacaaaaatgctagtctcagttgacctgaaagtgaggaggtgtctggggaaccccactccaaatgcaagttctgatctgcatatagatgcatttgctgataaagatcagaggttcagtttccataagctgcacgttccattcagacactatctgtcacagcccatttgaggtgccatctccagaatgaccagaatagttagttgttcaggactgggaggagtcacttattaactggtaattaacatatcaaatagcaactactttctaaaatagtatgtttgattagtagggataactggcaaagaactgaaatcctaacgtggttatagttgttgcagacatgccctatcgcttggaaggaacaatataaaaacactcctatttataaacagagtatgacattgtgatgtaacatatatcggtattcagatatttactagaggacaatgtattctaacatgacagggtaattggaaatttggtaatatgttccagtaggctataaaacttttttaaaaaatatttttacaaaaggccttaatgtgtttttacagacttatgttatatggtatggtacatagtaagagaaaaggacccagacaggcttgtctgagttacgatcaggaaaatcccgatatcgccagtgaatgtaagctcggcattgtgtcacagttgaagtgtctcattaccagaacagtgagctgtattatgtgacacaatctgctcttttcctaccatgctaagtttattcctgtcaggttcctgatttcttaatatattttcaattttctccctcatccctaaagtctcctattttatgtagtcgtcagaaccttccaaacatctatgagaaaaactcattctttccaaaaaccttggcattatgtccagtgctcacttgggctgcaatttagcattagcaattttctaatgtatcataaagtaatcagatggagctcgcctctgatgtaatagggctgaaagagacaggcctatttcagctctcctcacattgatggcagcagtcacactccttagaatgcattggcatgttcagggacgcgtagtaattcagccacctaggagtcttactcaaacacacaaccttgcttatcttatcatgagcacttcagatgcattcatccaactaagagaataaactcctaatggcctttgggaatctatgacagcaacgtttattctcactgtgccccaattctgggggtgctaaaaatgatctaaaggataccgagtgtttatttcctcaaacatttttgaactttccagtaaaaatcctttcctatcttatcctacctgaacatcatcgtgcttctattcacaatgcctcaccaacatttaacgagtctgctctgtgccccagatggtgctttgttttcttaaacctcagacaaactaaaaagagacttaaaaactctgtaatcccagtactttgggaggccaaggcgggtggatcacctgaggtaagagttcaagaccagtctggccaacatggtgaaaccctgtctctactaaaaatacaaaaattagccaggtgtggtggcacacacctgtggtccccagctactagggaggctgaggcaggagaattgcttgaactcaggaggcggaggttgcagtgagctaagatcgcaccactgcactccagcctaggcaacagaatgagactccgtctcaaaacaaaaacaaaaacaaaaacctcactttataggccaggccaacagtggctcatgcctgtagtcctagcactttgggaagccaaggcaggtggatcacttgaggccagaagttcgagaccagcctggccagcatggtgaaaccctgtctctacttaagctacaaaaattaaccaggcctgctggcacacacctgtagtcctagctacttgggaggctgaggagggagaatcacttgaacctgggaggcaaaggttgcagtgagccaagattgtgccactgcaccccagcgtgggtgacagagcaagactctttctcagaaaaaaagaaaaagaaaaagaaaaacctcactttacaaagaaaaaatttgaggcaaagagaaattaagtcatggttcttgaccacaaggaacaaagactctacaaaaggtacctgtgccaattccctgtctccagcattgaccacaattaagccacaccacacaaactccaaccaagcttctgaccttccttcccaagagaaaagagaaaaataaaaagcatgtccatggtatatgaaatgagcaatatattgagggtcaggagatattattgccctggctgtgccactaacaagctgagtcatatacaactggattggttatatcagccctggtatcctgaaaagtaaaataaagacaggtccatgggggagggtggaaaggaagaaggatcagaaaatctctgaggcccctttcttcataggtaatcagctgatagggtaagaaatggtgtttccgtcatgaattcccttccttttaagttatatttacagaatgcctatcatgtaataggcattgtgccagacacctaagatatctctcatttaatgctcgcaaatatcctgcaaagtagatactatcctcatttttcatgttagggagtagaggccctgttggtataagtaacttgcctgcagacactgagctaggaattgtaggagtcaggattcacacctgtgtttacctgacttcagaacctatggtcctcctaactgtgctatatgcctgggccttggatgaaccactatggaatgcttttatataactttaactgtcatgacatctaattaagtttctgaatgaaagagaccccgtattttaaaataaatctgtgggggaaggagtttgaaacttgttcaactagaatttaagcccaagatacactcatgaactaactggcttttctggggaagaatgactagcaattttagagaaagcatctcaactaagaaagacattaagttgttgctttctgttttttcctccagaaaggaaaactggaggaaagaaaatagaaggaagaagggatggactctgaaatgactgacctgctgaaaaaaaaaacaaaaaaacaagagttggagacagcagaattacaatcttgacattagtcccatatgggttattactcttgatatcattatagctaaacggaatgaaaatagaagggggagaaaaatctcagtgggtattgcaatttaaatttgccttgtaagctaatactgtatatttagagactgagcagacagggtggttggtggctcagagtatgtgcaggggctgctgtgccagctcaccaaagcagacattcattagagcaaaatgtagatttccatttcttggcatctgacatgggctctttccttggaaagaaatgtcaatttggccaaaagtgtgaaacctacaataaaagcactgggactgtggatttcatctagtctgcacattcccacccctttctttcctactgtgaaaatccagttgagactcggggtgctcagtggagagatggcagaggaactggttaggatgtagaaggctaaaaggggagaaggggttggaagaggttagattggactcccaaattcctgttttcttttggctttcaattaccattttctcttgccctaagactgcccgacacaagaaaccaaccacaattactgttttgcacagagctctgaacaatggcagcttccaaatccttggcatcgcctgcttgctctgcatgtgcggggtgctcatccgcagagactgtgggtagtatgagcaaaactccggctcctgacgcagggcaaggaagaggcctcccctgttttaaaatttcactatgtttatttcttttgttcaatagactggaaagactatgacgacagagagcccagacacaagggacagagtgaagttttggaaggtctgctgcagcaggtccgagcccttcatcagcattacagttgccggggtaaggataaaaatctgtgctgggccatcaactgaggtctcggtggcgccggtaattttagcagtttcctaactgggtcataccttctcattcatcagggagagagatattaatatttgtacatctggaatcactttacagcactatcttgctttaacccttcagaagagacttccctctccttcgctcacttcctttccctctccctctctccatatgaacggtttgaaaacaagcacaagaaaaacagcagctgccatgagttcccttctctcggaattgtcccttcacaagagtcctcaacggggctagctctttgggatattcacccaaaaacattttgcctccaaggaaaatcccctgagtatccctgcaggagcccagccaattataataacaacagtaataataaacctccatatttattaataatatagtttacaatgcagtttcacacccagtatctcattttcatcctcattttggtaattaccactgaggctaagtggtgttccccaaggtcacaatgccaggaaaagacagaatcaggactccaagctggattcttctggttctaagtctagtcctcctgacacgcttcatttttgtcccattcccttacatcaggactgggcactgaactgtaacctcatcctgaattttaatcttcctctgtaccactgctcacaggaaagtagagcacatattccctagactttcaccagctacacccagagaatctctgagaaggctttaaaagcttcttttctacttgggctgttcaattgggacagggtcagatttctgatctgtgtaacgattcgtggaagaggtacttagttttatttggagaattaaagcctacatgaagttttcattttccatgcccccatcagatctctaactccattgtgcgctgtagatttaggacactgctggaacagctgggtaagaaatccactattgtggaggatctcttgagcccaggagtttgaggctgcagtgagttacgatcatgccactgtgctccaacctgggcaacagggcaagactctgtctctaaaaatagcaaattttttaaaagaaaaaaaaaatccacagttgaaactaagagatactcactgagtttgagcttgctatagataagtcatactgagcattagcaaaaggttgttcccaattactacatagctatcacagtaggacccttcagcaatgttggctctagctagaaatgaggacaagtgtttggaagaaaataatattcttctaatgaccagttcattaggatatgtaaatatgcatgcagtagctctgaaacccaagtgggatttccattcccagatctctaagaagtctttacccagaccaggaccttcagcatattccacactgaccaaagtctagtcagttctcggttattgagggctcatttaaccaggccagttgttaccaaagctcctttctcatcttctgcctttccatcacatccctgcccattggttcctgtgtgacagcaaaggtaacaaagcaagtggacagatgattcttggaaattcataagccactgtgtgtttggtcttgatcagagggggaaaagctgaaactactcatgagaatgagagatttttttaatattatctgaggattcatgctctccccattaccactggattcctatctaataatcaaaaaatgattgcctagatggtccaattgtttctatagtttccatccaacttctgtcatgtatatgcttttcccccagaggaatgtaaatatacacacaatatcaggaaagatttaagtaaggcataaggtagaactttccaaaaaagaagaatatattttatatgaaatatactctggacacttaaacagtgctcaaagtatgttccaaagatcagtgatccaataatatgctcagctgaaaaaggttctcttgtcatgtaagttttggaaatgttgaattctacatcttctcttagaaatttaaaatatactttagaatattaaagactctaataaacagacatgtcacatttgcttaaacaagcattttccaaacttctttagccatgtacaactttttcacagtattagtattccaaagcacaaattttgggaaatgctaactcataatatgccaaaataaattacctcatacacacacaaaaagaatgaatctaagatgatttaacataacccttaatgcagaaggataaatgaagaataagtattgcttacagagaattacaaattttttttattattattacaaaatttttatttaaaatattcaaatacattgaaatactatgtggtttattggggacataaacttttaccaactttacaattagaaaaagtaatatttcagattccaattctaccacttacaagctgtgtattattgggaagaggatttcgcctctctgatccacagtttcttgatcagcaaagtcaggataatattacctatcttgcaggattgctatgaagagtaaattaggtgcattaaattcacctgacacagtgtctttccctggcaaactgtaacttatttttctcccattgagaaaggggccactctccatcctcagcactttatgcatattccatagaattgaagtgtaattggtgactgtactgtaatgaccgtgtaatgactcactaactatacaacatattccaaatatgggagtaataataaaaatcacttctcctactaaaatcctaaataggaggtaccaacatctacattaatttctgcattttggctaaagaactggccaaagctgatctgcatgcttagtattgggatgaaaattcaagggagatgttaagcaagcttcattgttcacaaggtgggtacactgatgtacataatgaattacaatattaaaacaacaatcgtgttcatcatagcaatatcctatagggatgaatttatattattatccaattattcaacttgcaatacaatagtaactgaaaccctgcctactatgtaatttgtaggtcacatagtaggggctagacatgccaacatgaatgaagtaaactcctatgctccttacaagttagggaactactgcattcagagtacagaaaatgaactgttgcttcagaactccaaaccaagtagggaagtacagtatagaagccacaaggttcttaggagaaaagttagtttagactgatgtgtcagtcaaggtgaaccttactatgttacagtaaccaaatgattccccaaacctttatctctccctcatgctatgcgtttaccactgatcagctgggagttctccttctgtgttattaacatcctctctctggaaatatttgctagcaaccataggagagggaaaaataactcttgaaggtctcatatgggcaagactttctgcatgttattacacccaaaactcattggccagaggtggtcacatggccccatccaaccacaagggctccaaagtacagttttaccatgtgaccagacctagaatatttaatgcttgcatgtgcccttttcccaactggtagcagtacttcttaattttctctttttatttttagtctgacttttttagtttaatcttcatttttatgtgagctatatataactataatgtgtctctgaagccagactgcctgagttcaaatctgggctgtacttttacttctgctggctgtgtgaccttgagcaaactgcctaaatggctctgtgcttcatttctctcgtctctaaaatgcagataataattatatatacctcattcattcattgtttaaggattgaataacttcagtaaagcagttaaaacagttttattattttcttaaaagcaatttcttccttcttccatttttttcctccccaaagataacctcttaacctttagctaattattttagtattttccccatatctctaagtaacgtgctcatatttctaataatgtttttcgattttagtcattacctcactaaagaaagtaatgatgtatctctttttaccccacccctcccttatttgcgtgcatagttcctatcttctcaatctcttaatatatgtatattgaattttagtaagatcagtatttactgtttacattataatgataaattatatgattattttcctttcctggataactttttgttttccctgtagttaataatcatttattgtgcatttgcttgtttttctatatggctataataattaatccccaaactattcttgaattaaatcagtcttctctcaatataatcagatgctttagatgtttctattgcatcttcttaaggaaacattcatggagtcctctgtcctgctccagtctagactggtcacttgttgcccagtgtacaactgtcacccttggattgccttttactaccatattgaggactcttcttatcgctctccaatattgggttccttctttctgtattgcatggtggagctttccccctcacagcatcctgaaagggggcttgggaactaattttcagagaaattgtatatctaaaggtgtatttattctacttaacatttattcaaggttttggatgagtatagaattcttggttgaaatcctttttttttttcatattttgaaggtattgtttcattgttttccagctttcaggactaagtctgatgtcattctaattccagaggttctatatgaaacctttttttcccctctctggaaggttttaagttttcttttgactccaatgttctaaaatttcacagtgatgtactaaggcatctgttgtctgttatattgggcacctggaaagtcctttcaacatgagaagttatacccttcaattgtgagacattttcttaaattacttctttaagtatttctttgccttcttttcctctcctctatcttactagaactcttgttattcagattttggttctcccacattcgtccttcaattttattttctttttttcttctactttccatccttacatccttttgccttactttcttggagatttcatcagctttaattgctaagccttctattcggtttcttagcttttgacaacatgtttttaattgccaatgctctcttttgtcctctggttatttttatagactcttactctctttataagggatgcaagtcttctcttacttctcagaatattaatgataggctttgtttcattttatattttctttcctcagaataatctttcttttctgtaagttggtctttggtttactaatttttggcctttgtatttcatgttagatgcttttctcaactgcctgttgatccttcaatgaatgctcagatttcagagaagggaaatcaatagccattgggaagttctgagcacatgcgtagggctctttacttacaggattcattgtagggtgacctggcaccacctttccattgagatatccccaatgtcagaatctttgggtacgttctcttaggctggtcaaattttccacagaaatttcttccagtgtcctgcttggaaggtataagtttggataccagtgttctgagaacccaatagggaaatattatgtataaaagcttatgcacaaatctgcccatttggggtacactgccaccatcatcagcaccccattttcaacactacctgatgtctcccactccggagatgtatgttgttgttgttttgggtgttcgtttgtctgttgatttccagagaacaagccactagctttcttctagagtagggaagaggtatctgtccagtcatgtagtagaggaggagatctagaagtctaactactttttgaacaggctttcacaaatcctccttgtttttagctcacactcacccctcacttccagcagtccatggagaccatggagtgaatcagatcacttctgaactttctccactgctgtctttgacttcatccatctcaagtcttaaatctttctatccatctgctttccagctactgagatttgcttacttttgtctcctttcccatctctttgtctttaaaaatttatgttgtttccttcttttcttaatttctactctgcttttagtgaggtttggggaaagggtagtatgtaatgaatatgttcactcttccatatttaactggaagtcccagcagcattatttccaagcagccaaactcatgttcaagtcagaaaaaagaatgattttgctttgttctgcaaggaataaccattaccaacgtaagcttgaaactggcatgaatgcttgtgtcagtcagctgttcctatataatcatagccaaagacacactggccctcagtcatgggccacctgtccaggtttctatgcctaacagcagtcatatggaccatattctcatctccagtgacatgtctgtcagcagtctggtggtgataccaacaacctcattttcccttcattgcatagaatatgagagttaaaatcagtgattatgtagcccagctccatgcaatattatttgcaaaggctgttataggaagtataggaagcctactacctttattagggcaagctccatgttataagcagaagacctgaacagaagcaatgaattatttgcttaccattgtacctgcagagcctgatgcatagtagtgcccccaataaatatttgtccaattaatgaatgtctgttttcccaggcactgactttttgagcaattcttttcacttctcagcctcagtttcttcttctgaataatgaggatgataatcatacccatccctacacccatttttgtaaaccaacatacacaatgaagaaaaaaactgttccagaatgctggcagtggttatacagaagtgacgagatgatatgggtggggttttgctcttttttttctattctccagactttctgtaatgtgcttacattaattttataatgaaaaaaattaacacaatacgtagacttacagggaatgctttaccaacattgagaattgtatgaatgttagaaggcaattgcgggagttgggagaagggcaaaggagttgattccatgtctttttatcctaccttaaaataaatcaaaaatttcaaagcagagagtatcaacagaacacctacgtggtctcctctgcagttataaagactacttatctccagcatttttgaggagttgttcattgagttaaccactggcatctcaagataccagagcttctttttttctcttttttttttttttttttttgatacggattctcgctctgtcgcccaggctggagagcacgatctcggctcactacaacctctgcctcccgggttcaagcgattatcctgcctcagcctcctgagtagctgtgactacagacgtgcgccaccacaccctgctaatttttgtatttttagtagagacagggtttcaccatgttggtcaggctggtcttgaactcctgacctcgtgatccgcccccctcggcctcccaaagtactgggattaccagcgagagccaccgtgcccggctacaagagcttcttataggcatgaatgagcagaatccctacatgaacctgaggataagtgacactaaagggatgggggaggggaaggcaggaaggtaggaaaatggaattgggggtgttgatctgcccagtggaatttatactgtattttttaaaatacattccagaaagcacaaaattacaaaccacaggccgcaagcagtcagtctcaagaagcctgaaacacctgttccattcctcgaacaagtttgtgaagaccttaaaacggtgggttctatgtagttttttcaggaaatcttaacttttcaagaatgcactggttttggttctgagtagaaacttggtagaaatttttttgtgttcaaaacaataaaattcacttttctcctgagaatttgtgtaagacagtaattttctctcttttgagttgtaactagtgaacttatgatacttagcaggaatacgttcctaggtatattttaaattcatcttttatcacatccaaaaaaatatttttccaagatggttgaggacaatgcttttattttcctttttctttttaggggactctacatagccgttatattttattacaaagacaatatcttagtcaccaatgaagatcaagtaccaattgttgaaatagatgactctcacaccagttctattacacaagattttctgtggttcacgaaggtatactaagttctgatttcatttttccctactttgtaccaatgttactgcacaaaaatctctgaaacattagttgaggggtctccagcgatcagagttttggggtagaaataaagtatctccaaggtccttttcagccctggtatgccctatgtcattttaaaaagcaccaaagtaacgtgtgcgctacattttcaaagcaaagagacttgcatcctgtcacaatgtgtctccactgttctgagttatgggatcatttggcaaagactaaaatgtggatctgaccgtttcattaacattcagatctttttccaattggacagagatcaaaaagttgtttcgtgtgtgtctgaaaatggactggagaataaacatcaggggtcagatttctttctccctgctttgctttgatgccacaacctaaatcatgtactggcttggacgatgacatgattgcatgccttcttttgcagctgtcttgtatgtgggaagatataaggtggctgaggcaaagcataccaatatcctcatcctcatccacagtgctgcaaactcggcagaagatgctcgcagcaacagcacagctacaggtaagggaccaggtttcaacccaggcccccaaggaaaatatttttaatgtagaaaattcagttaccagtcctacctagaaaggaaaaggatgggctcccttctctttcagacccctaagaatatgaagttttcttgagcagctggagctgcgtacctgtaggtatgcaggtttcatataggaaacctgtacctttagcagtctcctccaagtgagtctctcttgaacagtatataggagtaactcattaaacaaggagtaaggagacttgagttctagatttgatattagtcagccgactcagttctcctctctgggccccagtttcatcacttgcaaaataagagaagtttaatgagatctcttgaaggactgttgctgctctgccgtcctatgcattaatgagtatatgaagatggaaaaaagagacgagcagatattttgaacagtttcttggtgtgatgattttggtaaagcatagacatttttgcttacttataaaaaaaaaacaaatagagaacaacgcttaaaagattatctttaagcctgaattgatttatccttccatattctcagtcacatcagatcaagtccccaatctttgtaggttacagagctcctcctagaagtagcattaaattctaaccaagattttctgggttttcctcttactgttttctggtattaagtgaatttgtgaatcttagcacagaaaaaaaaatatctgctacatgggattggagccattaagagatcgctgagcctttatcagtaacgggtatctacctacaaatctgcagttacatcaaccccagaaatatgcataacaggaatctatgtaagctgtgtttggccaggccatgtaggtcacagcataaaaataaagtcacaataacaaaaaaaaatttctatggctttgccccccacctacaattataggaatgtcatttcttaaaccctcacaataataataattcaacttcctgcaatattttgttgctattacaattaattcagaaatgcaaattttgctcctctgtgatatattccattacacaggtagcttgctgttttgtatgctcagtgagattttagcaaacagctgttcatttcaactcactcgggttttttttgggttggtggtggtggtggaatggaatctctctctgtctcccaggctggagttcagtgccgtgatcttggctcactgcaacctctgcctcctgggttgaagcaattctcctgcctcagcctcctgagtagctaggatcacaggcacccactaccacacccggctaatttttgtatttttaccagagacagggttttaccgtgtaggccaggctggtctcgaactcctgacctcaagtgatccacctgcctcggcctcccaaagtgctgggagtacaggcatgagccaccgtgcctggcctcaactcactcttgattgcataatcttctcttccaactcaagaagcagttcttggagcgggccatgatgactgtgctgaattcaaagtgcctcgtcctttcatcactgacccacttgagttggaccatgccactgcacctcacactactctttctttaggataaatacattcctaagaggctcagactccttagtggatcctcccatcatcctaccatacagcccagacatgcctggatcacagactgaaaaaccttagaatttcaaggggggctctttattatgtgtttattggaggtttcttagaactttcatctgatatcagcaatgtgagaaggatcaggctgttacaagtcagtgcagtcagacgctgagtgatgcaatgatggccagtgtgaccctactcaactactcccattacaatacttttggacttcctcagcttccaaatctatagacctcaccacttttcataatgcatcagcccacttctgaagtcatttccttccttgaccagcttagattccttagcccatcttaatcacttccttgaaaatattccattttctccttcatattatttatttggaaaaatcccacgcctggatgaatccaacatgtctaaagtagttacacattgccacataaaaaaaaaaaatcacaaaaaagggctgactggttttatgttaaattcatgactacaattctcacacgtaatgttagtggtccaatttcctttctctactaaatttgctttctcacactgtaaagcaactattttaaaaccttctccccagcactttgggaggctggcaggtggatcacttgagcttaggagtttcagaccagctgagcaacatggcaaaaccccatctctaccaaaaatacaaaaattagctggatgtggtggtgcacatctgcagtactggctactcaggagtctgacgtgggaggatcacttaagcctgggaggcagaggttgcagtgagctgagatcgtgtccctgcactccagcctgggtgaaagagtaagaccttgtctaaaaataaaataaaataaaataaaataaaaccttcttcattctcccacatcccttctccttccccacactctccttccccacactctccttcacatctcaggtgatgatttcactgtataattcatcaaggaaaaaaatggaaattaatgattttttctgccaaatttataaacctccttgcacagaccgaaccttctttttttttttctttttatttcagaaggtaaagtctcacatttcctaccataagttcattcctccacatgtgctctgggtcccatctcttccctctcatttttattttaaaatactcaagtctttccagttaaatctccccctaaattcctctcatagccccacatgccccttcagctaccaaactattctcttccttacacccaaacttcttggaagagttacctacatcccctttctccactgacatctccatttcctaccagttctcaaacctctctctgacttttgctaccatgatgcatacaaaactgctctttaagggcaccagaaaccagaagcagatgatgctgccaaagctggagcttcaggacccctcacttgcatgagctatgagtgtgggacccctgtaagtgtggaacccacagtgttttagggaagggaagctggattgcagtcaggaagcatttctcgcaaactttctaaagaaatttctggaggaaaggggacccaaaattccaaacagtctagtatttgctggagagaaggaaatttcttttatccttctggataaagattcacttttatacctagtcttatttttgaaattctgtgttctctgtcttaaagagtgcctcaaaattgtatagttcaggcacccacaaaacctagatctagtcatgccaatgactttggtttcactaagcaacattttatacacttggttccatactccttttggagattggcatatcccttggcttccacaatttcacactgttccgattttcttccaacttgctggtctttctccgtatcctttgctagttttcaagctgtttcctttgcttagaatccccttctttcctcactttgccttactaattcctatatatcctccaggtctcagcttaacttttatacttccttaaagagcctttctctgatcccttgattaagtgaatcactctcatagcaccttgtattcttcattcaggaaagtgatcagaatcccagagtttattacttgtattattatctgtttagtgccccacttggactgtgagttcctcagttcagggaatgtgtctgtcttggctaccactatatccccaatgcctggaatgtggtagacactcagtaagtacaagttggataaataaatatatctgtcaatccaaacccatgtaccccagtgatcacacttgagggaaactttatctagccaaagggaaaagggatcacagaaatgttttgtagttttgtagcatagttaccacctggatggatagctctccggtcctgcaccgtgaccggagagcctcatagtcttcaataaatggtcaccttcacagtgcccccatcaaggcctgagtgctgtatgcatgcccttctctctaagtttctttatgcctagttcaatgataaaagttgctttcatcactttttttggtaggacctattgcccaaactatttactagtctgtacagcgaagatgtctggaaatactgaaggcaccttttgttggtgagggaggtaagagcggtggaagggaggcgtaagttatagaaaaacttttctgaagggaaagaaaaagaaatttgaggattgacacatagttaatatgttagatcactctactaatttaaaatattttacaatgtggccaggcgcggtggctcacgcttgcaatcccagcattttgggaggccaaggcgggcagatcacctgtggtcgggagttcgagaccagcctgaccaacacggacaaaccccgtctctactaaaaatacaaaattagctgggcgtggtggcgcatgcctataatccctgctgctcgggaggctaaggcaggagaatcacttgaacccaggaggcggaggttgtggtgagctgagatcgcaccattgcactccagcctgggcaacaagggtgaaactctgtctcacaaaaaaataaaataaaataacaatgttctgaggaaagtaaaaatgcattatacatagtttgattggcatcaaccataaataaattctattgattttcctctggtgcatctcatttaactctcctctcctttccagttttgtatactactgcctgattactccaatttggtcaaaagcctccaaagtcatccctctgctaccagtcttgacagcctccaatccactttccatactttggccagagtagccaatctaaaagattctgaccaaggcattctctgacttagactcttccagctgtggctcagacattttatcacggctcacaaaggcctcaatcatgatctttctccccctcatctgcgctcatagtcactgggcttagtcactgtgtccaagtcaggggacctacctttatcacagtgcatatcaagcactgtgcaatttgcaccttgttttctgggtttctgctctctagtgagctcctttaatatataatagtaaatagtaaccgtgaagtgactactttcatttatttaacagactaggtgccaggcactgtgttgagtgctttacaaactttactgtcatttaatctttgccacaacctaatgagaaagtactattatggtattcttttaacagatcataacactagggcctagaaatgctcatttgtgcccaaggttacatagataggaagtagcagattctagattcaaatccagatttatttaactccaaagcctgcttcctttccagtacttcatcatcttactgtgtagtaatttacaaaaaaagcagacaaaattttaaagagaaaaaattattcatattatagtaaaaaagaaaaagaagtctattcttaattaaaatttcctaggccagaggagagataagtatctcagcatgtgggaaaaaaaattaagatgagaaatcctgtaagtgaccaaaagcccacattgtttttctttctcttaggaaaatgtcagagggcccaaagagggagaagtgtacattgctcttacattgaaaggtgtctaagctacttatccccccaaaacagtaaaaatctgacactgcagattgtgctaaactttcctcctccatagcttttagaaatgagtgttagtgagtaagagctaagtaacaatatatgaataccgtgttctttacatttgttaaggggagaaaagattttcccaaaattttgctcttctttttcaggcctccttatcccaactctggacttccttcaccttcccatgtccacatcaccccaaactgaataaagacctctaaatattgtgcctctgcctagggcttattgacagccctgtgatttgtcctggttataacctagatgcattcctgttagccatcaggtggctcttataggatcatcaggagccctagatcacctaaccttgattatgacaggtattaacatggtctatttttgctttaggccctaaagaaccttgaattctccctcatggaagatggttccaatttattttcacaataatattctacttttaaattgggctctcctcaaagctagctatccaacctaatttgatgtcaataaaaaatttcaagaagacttacagtgctttcttattcaaccccttagaaaacctatctacagctgatagtgaaccactgataataactttgtttaagtgaaaagaccaccgtagtcaatgtctacccatcagctttggtccaaagtgaatcacattttccggcgtcttaatgataatacaatatgttaattaagtcaacgaaaagtggctgagtcctttccatgggcaggcactgtgcaagggacacagagacacaaagatgaaacaactatgaattcataacgtgaactcatacaccaatacatgcagtaaagccagagacatgctaagatggaagtttgtagaggaaacagtaagggaaaaaagagggatggtaaagtcttccttagagagttggaaaagtcttcccaggggaggtgaaatctgggatgggtcttgaaaaggagtagatgtaagcctgggtgggattccaattagagcagtaaagaaagcccccaccctacattgcatcgagcttgagggtttacaaaatactttttcatgagttgcttgatttaatccctcaaacattcactgaggtaaagattagcataacagctgtctgagctgtaaagactcttacttttagatgatgatactcaggaccagagagggtaaataattttttcagaagtccaacagttaataaatggtagccaaccctgaaattcaataccaaatataagtaaaggtttaatagcaatggtaggctggagccaacctgtactggcccgagagagccaactgttaaatattcggggattttgaaagcctgttgtcaaactctgggtagtttgaaatcccactacagcaagagtatttacaccacagaaaccggcatatgctacaaatcagggctttcttttcttttcttccttttttttcctttttcactagccagtttaccagcatcacactgcttattagtaccccacagggctggactaaaagccacacccacttctctatgatttagaagtcaaatattggaaagaaaaaatatgactgagtgattaggccatcgcaaaaaaatcataatcttgccaaatgaatttttatgtcaaaaattatttatgaaattccttatttgtcctatgtctggtctttgtaaggaagaagataaggtttcggccgcagtccctacctgtgagggaaaattccggggttttcatagatgtagatgttgacttcctggctcattcatttttaggtcatccttgtcacttttacaaatcccagttctatttctgtattcatgctaacagggcatctcaccacctcttatgtgagctcacaaaagtaacagctaggagctctaggatgatttataatgtttagaaatcacagatatttaaagctagaggggattttatcctattcatccagtgttctagcttagaaatcttcaaaccctgcatatttgtaaaactcctgtttattttaggaataactacctgagcccctccatattgagtgtggcatctttcccttcctaccttcctaaaagcattgtctgcctcagttgacccagtttataagcaattttaacagatttttaaataaacagaagcccctgaaatgcagataagtcgaatcaggccaatttcccaattaaagtatcttgaagggaatgtgcagtcatttggggacctgtacaatgtgctacattgtcaattcacttcttcattttaaacaaccccacctcataccagcttactgcagatctcctgagaactccacagaagcatactttaaatatcagacatttttctttaaaacatctgggattctcttcaagtgctggtaactgaggtttatgtactggtgtgcctatgtgggtaagaaatatgtacagatactgaatttgcctttttaaaaaaacataatttttatgcatcttgctgtaatctttgcaggctctgcaatctttacaaatgccttgtaaagacctttgagcttctgtgaagtacatgtctatgatgccatatattctaggtttaagtgcaaaaaaaaaaaagagagcaaacagcttctcagaaatcagattattattcacggtgtcttttgttgccgttgtgttgctttgttagcataataccctctatgctaccggtaatccatttgtttccagaatttacttgggacacacaacttgggaagagtttactatgagcccattaaagatcgacatggaaacatactcatagtcaccatcagggaggtggagatgctttattcattttttaatggcaaatggatgcagatctcaaagctgcaaagccagagaaagtctctatcaacacctgaggagccaacagctttagacattctactgataaccatccaggtatgtagtttttttcttaattcccgggtatacttaaggttccaaacccaattattgaaggtctagtgaaatattgcaagagccatttacatatgcagtgatggagtggagagggtccagagatatgttgttgcaaatgcagaagcttattttttatttatcactccctagatgtggaattcattcatacaaatagtgggcacctaataaagcattttcatgccctggccaatgagccagtaagaaacattgaggccaggcgcagtggctcatgcctgtaatcccaacactttgggaccaaggtgggtagatcacttgaggtcaggagttcaagaccagcctggccaacatggtgaaaccccatctctactaaaaatacaaaaaaataaataaataaatagctgggtatgtggtgcacacttataatctcagctgcttggggggctgaggcggggagaatcgctggaacctgggaggcgggttgcagtgagccaagattgtgcgactgccctccagcctggacaacagagtaagactctgtctcaaaaagaaaagaaaacaaacattgagaccaataattgagtaggggatagggaatctctagatagtataatcaaaacattaaaccaatatctgaatgaactgtaatgacaatacatttctaaattgtatatatatgtgtgcatgtgtgtgtatttgagtgtgtgtacatgggtgtgtatgtacaaaaacactctcacacatatttactcctgcatgttccttacgatactcccttgggacagacaggcatgattaagtccattttaggaatgaaataactagaggctgggcgcagtggctcacacctgtaatcgtagcactttgggaggccaaggcaggcaggtcacctgaggtcaggggttcaagaccaacctggccaacatggtgaaaccccatctttactagaaatacaaaaattagccagttgtgatggcagccacctctaatcccggctactcaggaggctgaggcagaattgcttgaaccagggaggtggaggttgcagtgagccgagatcacgctactgcactccagcctgggtgacggagtgagaatccatcttaaaaaaaaaaaaaagaaagaaaagaaaagaaagagagagaaagaaagaaagagagaaagaaagaaacaaagaaagaaagaaagaaagaaagaaagaaagaaagaaagaaagaaagaagaaagaaagaaagaaagaaagaaagaaagaaagaaagaaagaaagaaagaaagaaagaaaaagggaaagaaagaaagaactagagctcaaagaggttaaatgacatagagctacacacagaggcaatttagtgaagctaatgaagctttgatgtccttcagccttcacttgtacaagcctcttctatgtccttgcagggaccctagcagctttgctttcataactttgtgttgttttccttaaaaaagacaccagaaactatatccacttgagtctccacaaaacttgattttgtcccttggcacacagctagaaaatgacagagctgaggcttcagttcagatcttctgattgcaaatcaggcttctttctgctacattatgtcatattttgaggtagaagtcaggattttagtgagtgggggacaggaaatgaaataaaggataaaagacttacttgaatactgaatagccaccaaaattcaaaatccaggtagctcagatgcagcccttggcctggatggtggaattgggacaccaacccatgtatgctcctgagtccagcacgctctctctgcctcacacattcttttgtgaacatgggcttcaaactgtttctttttttctttctctgttttttttttaatccagtgatagggatgaattgtataggacacttaggttaggtagaaaagctggcagaaacatctacactgagccccctgcaagcagtagcatatccacagacagccacagagagaaggaaggacccagttgcacagaaacaacccaaatctgaccttccgtcctgggagccatctgtggtcaccctaaacggctaacttactttctaagttactttcattccccgccaaggggtggcaagtacaataatctcattttttcattacttgcaccggcccaaaccaggacaaaggccaatgaagcaaaggtaagctaattggtcaaagccaatacctctggatttaattttgtggaatttgggttcatagggaattgacagagagtatgtgcttgtgtgaaggaggtgggggcagggaacacagacacatttgaggctcccctcttcaccttttataagcaagtgctaaaagaaacatttaaaaaatcataataaattgagcttttacagggtgactaatacactaatcccctatagggataaactagggtctgggctacctttgctcctagaaacacagcacaggcctcaacatgatataatacctggtttctcctagacttattacattaaaaatgtgttacaggtgcagaaaaattccaatctggtgaaaggttgttagagaaggaaaccaaaaatagaggcaggatcgggtttccacacagatccaagtggaaaatttacccccgctgactggcacattcccacctgatgtcattcccacccacccccactctcccttctcctccccctacttcttctctctcccctccttcccatacaagtctcacactagagaggaaatggggaataaaactatgagggctggtatccaatccctcctagacttaagatttaattatatcaggagttggccccaccaactcaacataaagggagagataggtcttggtggtacccaaagcaggctggtaattcccacaataacaggccacagaccactctcttttctcaggggtggtggagtgatgaccaccaggccttctcattggaagcctgggcttctgtctgctacatcacatcacattctgtgcaccactttgaaatcaggatgactgggtgtgaataccgactccaccctttctggttatgtgtccagggcattatttaacttctcatccctcacagttcctcctctgcaaaaaacctacttcatagggttctaatgaagataggtgagttagtacatacatgattaaaagagtagcacaaagtagtgctcaataaatattagtgatttttattatgtctcagaaaattttttttctttttatttttattttactttaagttccagggtacaagtgcaggatgtgcaggtttgttacattggtgtgccatggtgatctgctgcacctatcaatccatcacctagatattaagcccagcatgcattagctatttttcctgatgctctccctccccttgcccctaccaacaggccccaatgtaggttgttcccctccctgtgtccatgtgttctcattgttcagctctcacttataagtgagaacacatagtgtttggttttctgttcctgcattagtttgctgaggatagtagcttccagctccatccatgtccccgcaaaggacatgatctcattccttcttatggctgcatagtattccatggtgtatatgcaccacattttctttatccagtctatcattgatgggcatttgagttgattccatgtctttgctatgggaaataatgctgcagtgaacatacgtgtgcacatgtctttataatagaatgatttatattcttttgggtatatacccagtaatgggattgctgggtcaaatagtatttctgattctaggtctttgaggaattgccacaccatctgccacattattgaactaatttacatttccaccaacactgtaaaagctttcctatttctctgcagccttgccagcatctgttgtttcttgaatttgtattaataataatcaccattcatgtctcagaaaattttaagcaatgctaggctgccctcaggacacacccagtccacagagacctctggtaatggcctaatcattctgtggggcattttttcatgttttctacctttccatcacaactaaggaaaagctgtacaaaagttatgatccacgacggggttttcaaaacagatagggctttaacaaaatctgggcccataaataatctacgaatccctagggccccagggaaactccagtgtccaactccctcaaattcctgaccttctcaaatcccaggccttcaaaagaggcctctctcatttatctgtgaaagagcaaaaaatcctcctcacccttgcctgggaaggaaaagagagttattgtggacaagagtccctatgagcaaagtaattggcaatgagagtatttccaacagaaaggcccctctcaggtgctaagttgctccgaccattctcttcagggatcacttcagtccctagaagcctcacatgcaagctttttcctgaagcttaatctctcacatgtgtactatatattcaactttccaacactttgtcacatctatgatatcatttgatcctcatgcaaacccaaagaggatgagtgagtcgttttgtgtccagtttgcagaagaagccgtgaatttcaaggaagtaccttgtcaagtcatatcaactagaagagggaccaaacccacaacttctgactcctaggctgatggccttcccatttcaccatgctgctgtacacaccttcctccccgcccccacccctgcttttctctgcatcctttgtgatcctagggaagctgtggcgaaggatgtcttctgttccttctcttccctgctttccttttcttctgcttaggcattccttatcacctctaggtattcagtgtcttcttcttacaccctaggtgcccaggacctcttcttcccttttctgctttttttccagcacattcctactctttctacccccaagcagctccaaacacaaggatcaaaaactacaggaatcagaaagattgctggaaatgaggcaattgggctggacttaggaaacaattgggttcatgtaaaaacttgttcaccaatgttcatagaagcattattcacaatagccaaacagtagaagtaaactagatggcaaacaactgacgaatgggtaaacaaaatgtggtatatccatataatggaatattattcagccattaaaatgaatcacatatgatccatgctacgacttggatgaaccttgaaaatgtaatgctgagtgaaagaagccagacacaaagtgctaaatgttgtatgattccacttatatgctatgcccagaataggcaaatccatgcagacagaaagtagattagtggtttcaggaacagcaggcggagagataggggaatgacagctaatgaatgtgtggtttctttctaaaatgatgaaaatggtctggcattagacactggtgatagttgcacaaccaagtgaatacgctaaaaccactgaattacatacttgaacagggtgaattttatggtatatgagttataactcaattaaaataaaaagaaacaagtgtaagtaaaagagactacattaatcttgtcccctttaaagacagcagctccgattcagcctcagctaattacagtggaagaatgtggtcccagtcttgaaatattttcagtgttttgaagagaagttgaaaatcaaaaattttggtaaagtctttttatttttataatttagaaaataattcagaaaactaaattatttgcagtccatataatcttggacctacaaagaccactagccaccattttgtcacctctaccatcatggatggttgagttttcatactccatccaacaaaataaaagtgctgtagttattgaaaaagcaactacctattgttcctctaacaagctctcaggatctctgatcaatgacgagaaggtggatatacccttcctagtcactgtgcaagcacagcatattttctccctgaagaccagccccagaccccacctcctctgatcttctcacttcatatttaatgaataattttttcagtgtcaactaggtaccagacactcttctaggtgctacagaaaaaaacaaatgaataagtcaaggtccctacttttaaggaattcagtcaaacgaagacagacagatttgtaaacaaatcaaggtaatacaagacagaattaaaccagagcctgatagcagtacaaacagtgtactatggggaacacagacaaagcagctattaattctgcctgaaaatatcagggaaggcattgcagaagagatggcatttggctgagccatgagggtagttaagttaaccaggtggaaaaaaagaaagagagagaaagaacaaaataaaggagagaagaaagaaggaattaaatagatggaattaaattgagagcatgataaagaaatgaggcagaaactggaagagtggatttcaccctcccttaggcccacaataggccttacacagtcttcttatggcctctatgatgttgggtgagaaaaacttgcttacatgattctctcacactgaaatgtgagttccatgaagggaaggatcatgttttattcatctcgatgtcatcaatatcctagccacaagactgatacatagtaagtgctcagtaaaagttggtaaaatgagtgaatttgtgaaacaacaatcaaaacagtgagactagggcatgtatggggaaagaaaaaacaatccattttggctagagataaggaacacaaaagggctatagtggaaatggaggttggaaaagcagattagaggtcaaatcaggtaatatgtagaatcacaggcattcaatttggtgttagaaggcctttttaggctgggtgcagtggctcacacctataatcccagcactttgggaggctgaggcaggtagatcacctgagctcaggagttcaagaccagcctaggcaacatggcgaaaccccatctttactaaaaataccaaaattgggtgggcatggtggtgcacgcctgtaatcccagctactcgggaagctgaggcaggagaatcgcttgaacccaggagacagagaatcgagccaccacactccagcctaggcgacaaagtgagactccgtctcaaaaaaaaaaaaaaaaaaaaaaaagatggcttttctagtgtatcatggattatgtggatgagacagcttctttccattcccacacatttctcaggctccaaaacattttaaagaggaaaaaatgactacataaaggcaagaaaacacagagtagatgctcagtaatagtcttaaaaaattgaatgaaagagtgagttactccatcccagaatgctgttggtttttatataatcacagtgtactcctagctcacattctatttgtggtcagttctgacccccacatgtttttctgtgatactcttacctatcctatatttgtattcttggatgtaggtctttataagcacattttcatattaagtttcaaccgtaattatcatagccttattttttcaatgcatagggtcatttagaactttattactgttttccagaaaagcaaaaccataccaaatttgggacccacaaatttgatgcacacattcttgatttctttgtccagaatgtcaataaataagctgaacagactggtcctcaggaccaatccctactggaccatcactcaatatgtctactatttattcaccatctccattatctacaaatcttccacccagatattcagcttgttaaaagcaacgtagtccagattctacttttctgaggttatacagtgaaacagattatactggagacttctctctggtcttgttctattgctataataaattaaggtaatctgtatgatttgctctcacagaaccatgttgactcctcttcagtgtctcaagatttcctggatgactgcaaattgattgtttgatggttctttctcatttttcctaaagatcaataagttggtggtctttaattactagggtcgttccgtgtttctccccttcctgtttcaaagacagccatatttgtccttttctggtctttagggacttctccagttctccatgacttctcaaaagtaatgacctgtgagtctgtagccacatctgtttgtctagcaagtatcccaaggtgcatatcatcaaattcagtgaatttgaatacttccatttttccttccctcattaacaatttctcttcctttgattagtgttcatttcccaaattccaccttgactgaatttattgtagtcaactacttacttgtgatctaggctgaagagacaggatagaagacattaaaaagttcagccttatccatcctgatattaataataattgcttcttgatcatgagatcaaattttttttctagcctattcttttggccaagtgatcttttaaaaaattgtttagattttgcttttctgcacatgctcattagatgtttctcccagttgtgaccattcttattctatccctcttctactattcccttatgttctgtttaaggcatctgtcctaattttccacatgttgtgtacctattttatacagaaaagtactgggtactaaggacacaaagcaatgaaaaacatagccttaccattaatttcacagtttagttcaagaaaataacacgaaagaaaaatataagtactccttctgctgtaagcctacactgcctctattataaaactgatttcaatatattgtgatcatctgtttacttctcctttttgacctcctcaaaagtagggatgacatcatattcatctgaaaccccaatgtctcacatggtgcctgacacattatagggactcaatatgtgtttgataaaggatgagacagaggagacaatgtacaataacatctgctagatgttgcagatggttaattctacagaggaaagatcactcctctagagtatgatggtcaaggaagatcccatacttttccattccatatagaattctatagacatttcaatgtttgttttctcaccttccctgaatttaatggtagagttgattccctttaccttacccttttaaatattttcattagtattattttaattgacaagttatatttggatatagttgtggggtacaaagtgatgttttgatatatgtatacaatgtagaatgactgaatcaagctaattaacatatccatcacctcacttacttatcatttctttgtggtaaggcacctgaactttactctcttagttgtttaacccttgtttttttgaaaaccaggatatgctcctacttacaggaaactttctcctatactaagtgtattagtccattttcacactgctataaagaactacttgagactggataatttatgaggaagtttaattgaatcacagctctgcaggcttaacaggaagtatgcctgagaggcctcagtaaacttacaatcacggcagaaagtgaaggggaagcaaacacgtcttaccatggcagagcgggagaaagagagtgaggcaggaagtgccacacacttttaaaccatcagatcttgtgagaactcactatcatgagaacagcaaggaggaaatccacacccatgacccagttacctcccaccaggcccctccgccaattgaacatgagatttgggtggggacacaaatccaaaccatattaataagttacctgactcgtcactcctaactttgtgtcacaacccccactgcccaaatgtaaaagttttacctactgatgtggagggatggtatctgaattttgtaattattcgttatctgagtccctgcagttgtatagagaatcaaaagtcacaacccaaatagttcactggagaactgaccacacaaaaaacaagattccattcaaacatccctgtacttaacttggttgacacttactattgaatcaacagctttgttcagtctctgctgcttttggaatattatgatgtgacaatataatgcaaattcaatgaaaatccattacagggcaaaatttaaaatcttgtaaaagatacagaattcagtgaagctgatgatgtagagacctaatcaaataacatgcaaagccactgacaactgagaatctagaagtggtagaccagttaaggatttgaaaaacataacacaagcaaggatttcataagagtgtgacttgaatatcaacattttttaaaagatgcctggaaaaaaatgtgaagacttcaaatacttttataaacattatcttcttcgtggttgcattgtaaaagtcaaatataagtagtatcattttagctatcatacaatttaattttaaaaatcaagccaaaaaataaccagtgcttgattcattctttcttcattctcagaattagtgcgtaattatagctacaacttaaatgttaacataaaattcaataaacctcttggcagtacctttttaattttcaagataaggaacctacttactataaaatttggattctattttaaatcatttttcttaaacgacttttccattttaacaatccagaaattacaacgcttccttaactgtgctgtcagcttttacacttgcaaatatctgttttctcccagctaaacattaaaatcttcaaggacagaaattatcaactcaatttttctttattagctgcttccaccaccacctattcccaaacacaactcacacacctacactggcacagaaatcttaggcaaataagcatatagaatatattaaaaactgattacctggccaagaattctgctgaaggtaagagtagctgtaccactatttccccagcattcatggtatacctgaggtttctcacctaattacttagtgacagctcctttcattcatgacaagccttccttagaaaggaaaaggttttgagattgcccttcgagttgttttcttgttttctttttttttttttttttaaccctacaggatattctatcctatcacaaaaggagtcatcagcgtctctttcctggattatatctgggttacctaaagctctgtagctctgtggatcaaatcaaagttcttgttacccaaaagttgcccaacattctctgccacgtgaagatccgtgaaaacaataatatttctaggtaagtgatcaggagttaagattttccttgtgatgaaacagtggctcaagtgaccagcttgatgtgccagaaggaaactgaagtgttacttccagggcagtttttatggtgaggtgtcctcagatgccacactgaagtggggcagagcttagttttggggtttttttttgttttgttgttgttgttttttgagacggagtttcactcttgttacccaggctggagtacaatggcgcaatatcagctcactgcaacctctgcttcccagattcaaatgattcttctgcctcagcctcccaagtagctgggattacaggtgtgcaccaccacgcccagctaactttgtatttttagtagagatggggtttcaccatgttggtcgggctggtctcgaactgctgacctcaggtgatccatttgcctcagcctcccaaagtgctgggattacaggcatgagccaccgtgcccggccagagtttagttttaacattagaataaggagggcttgcctgatggttggtggaaggcatgagcccattaaagaggatactgtcctttcacattcccctctatgttactcatggtaaaaccactgatgttcaatcggttaatgaacagctgaccttttctttcaacactgctatttccagtatattttctttataatctaaaacagccatgttctttttgctttctgtttttaaatatcgcctacaggaatgggtttcatagagccaatgattcccccgatcttaaaaaatctcctcaccctcattctccctaactctaaccctctggcctgaggaccttgtatgttttctacaacccttataattctctatggaagaaaagaagtaacaaggcccgagcttctggaaacttgctctacagtttggcatttggtgaattaccctgttagctttgggaaagttgcccaatcttggtaatctggctcaactttacaaccctcatagcaggcctctgaaagtctgctataatgaactgaattgtgctcaacataaaaaaagaaagagaagaaaagaaaaaaaggaaaggaaggaatagacaagaaaaaaaaaagaaagaaattatccagaattcttcagacctcaaagggcataaactagatactcccaaagagtataaactagattctagttacactcatggatttgcttagccaaaggagactctaatttggtcatttaaaatgtgacccctaaagtggcaagactttatcaactctaatgtctcactaggtttcttaagtattgcttgatgacaatggaggaaatgatgatgaggaggaggagggaactcactgactaccatattctctcttcacttatcaactacacctggattttaagtctgccatctggtggtcattgccacaatcaacattcgttatcgcctcagtccttcccaaaaggttacattacactcatccattttctagatttgtgtcttaaaggcttgaactctatctcctagtggttataccaactaattttcccttgccaaggatccagttttcatttgtacaaaagattccagtagccttttctctgtcagttccatctccttcatccttctagcagaaactgattagtggtaggtgtttttacgatattcctaccggtaatttattttctaacttgattacaaacgctatgttagccacgttgtcctttaggtttatgcgtgcatatgctagtcacaaaactctcattttgttccatatcagtgatgggaaaaaagaaacatttcccaagcaggttctcaaatatttcaattatttgtgaagccaacagtatgcccagattgaagtaggatttaattttgaggttttgttcttttcttactgggacaaagggtaaattttccatagtcttgtccagtgtgatacttgaaataaaacagatatcttgaaaacagaaacttttctaagagggtagttagttaaaagagagtagtttttgatgaaaagctcatgccacattcaatttggttttctgacccacagattggagcccagcctggtagagccctttggggaaagcctcagagagttttcactagggtgggaacatatgtcagcacctcctctctttccatcccctgagaggagggctttcctttcctctctagcctgctcctgagagcctactgctgctccctgcagagttcgaaggagaatctgggccaactgaatgtgtttagagacttgtgctgagagacctgtggaaacaatgttgcccaagaggcatttaccttgatcttttcaagctccttttgaagagcagcctttgggggcaaaccagatgtgctttcctcccactgccattcttttcccttcccttctgtgtgacatttggaaaagttcattaggaaggattatagagcatgcagaataaagacacagattactggtttgtaaggaggatggaagcagtgatatgcatcccttggttccttatattggaattgtctggtattcctgtttgtgattctcctcaagcttttggaaggagagaaaaaccaaaatatcccccatgattacaacaggccagggttgaaatgtgccaagtggtttgttggctgagttggaccagagtcctgtggttactaaactgcagaattagccagtagatgcccctgtggtaaaacgtaggatcttagaatttacaggggatctgcagagaaagaaaaatgaagacagtcaggaaattattacaaaatatttgagaaccccaatctcaaaaactgattcatacaaattaggcctactgttctgaggtatatgtggtttgataggtgaactaagctgaaattagaaagagatcattttaagctccatttgggtggcaaaatgttcaaatttcatgaattacactgagttttaaccaccaagcattggttatccaggttctggacacatacactaagaaagttctgagctgtgttctgaacttttgttatatttctaattttaacttgactcaacatacagagaggaatgggaatggatccaaaagctttctggctctgaatctatggaaagtgtggatcatacttctgactgccccatgcaattgttcttctacgagctccagatggcagtgaaagctctccttcagcagatcaatatacctctacaccaggtactagactttaccatttttatcttctttttttatggctcatggaaactgcattgtaacattaagtggggtgtgtgtgtgtgtgtgtgtgtgtgtgtgtgtgtaaattttcctttacttaaacaccactttgcaagtgcatgcacattttgaattaatgcccacaggtagacacagcctgcgcttctgttcctttcctccagctcctctgtgttggacctctttcacattttctggaccccactgtactatggtctggtcagcaaaaaaaaaaaaaaaaaaaaaatcaatggctagtctaccttaaaagacaaccaggctcagcttcaagatagcataaagcaaagagaacatataaataaaggtgtactcacatgtacaaatgatttctctaagaatagaaggataacggtggtataatctacagcaatgtcccaaggatatgccatgctattttttctcagagaactttctgtcaaaattattgttgtatctaaatcaaaatgtacaaatctaacctccactaataagcaacttcaagaaaaactgttggcataaaggagaatagtaaaacttttttaggctctgcccaataggttaacatgaggtagcattatttaatttttttggcggggggacctatgttcatcaatcctgcctccctccccaaaacacacacacacacacacacacgcacacacacacacataatgaaccaagtttagcctgtaaactgggagaccattagaggagcgactggctctctttaaatacgagagagaaccatgaattggcctctaacccatggaggcaggggaataaattagagttctaagaatgtccttccattggggtgctctttcgattttaagtctaaaacagccaacgctaatgaagactaaattgcacaagatgccataaagacaatagagaagcaactggattattctaaaggtggccgtgtgttcactaggagaaaaaaaagtaagagctccacttgtgacactagatactattaaagcgtttcttggacttagcaggtttgaagcagctcatatttcattggtgactcttgggctacatatacatgttgggagaaggctgcctaactgcctaacagtgcatacaactttttttttttttggatacttgtaaaattttctcagtccttggccagaaactacgtttttcccccttaaccaacttaaattgaaactagtggatttttaattcaatccatttttgttgcttcatgtaattatagtcatcattttgaaaagcccacagaatgcaatcattttctgcttttataagaagcataaatgttgttttcagagtttatgtggaacattactgccttaaatcttgattttatatagcattattaaatgggctgaaccctaatatttatgttgtataaaaattccaagcttgaagttgtgtaattttgtgagatgttttatgccagtttggtgttgtttatgtaagtgccatgttgtaactctcctatttttcctccgcgcgtgtccctctgcaggcaaggaacttccgcctctacacacaggaggtgttggaaatgggtcacaatgtgtcctttcttctcctgctccctgcctcagacgacgtctgtacagccccaggacagaataatccttacaccccacactcagggtttcttaacctccctcttcagatgtttgaacttggtatagtagcttgtttcacctagaaatattaacccagcctccttataataaaatcacaaagttatatctgttcccccttgtcccagtggagggtcaataaatcacatgatggctttggcaacaacccttcctagaactgtgtacaagtctgagaaaaagcaaagctccaagactatgtgcctgagcaataattattgaaacctagcaaaggcccaatggagaagaaggaattctaaacagaaagttcagttatcaggctggacttcttgcctcccttctgctttcttaaaacgtaaatataaaaaccgatgttttcatgaaaagcactgccccttctctctctctctcactctctttttccccttccctctctctccccacttcctttctctctcctttcctccctttctctctcaccgtccccacatccccaaccagagaaaaaaataataatgaaatttaaatgtagagtgcatatcactttggaggggaaaaaagcctacaattttaagtagcactgacttattaaatagactctaaatttctgacagaccatttgagaaatggacaggatctcccaggatgcaatattgtgattataatgtgggattctgaatggtggaagatcttgtcctgactttcaaaaatgaatagcctgggctccagtttctctacttttgcagagacccctgctgcccactgagattgtgaatagggaggctttgtccccttcccatgcttcatcttgtaacaggccagtaagaggcaattagcaagagttcggtcagttcaaatgaattgtacaatttgcaggagggtgagtgagtgggtgggtggaatggaggcagaccctctctggattgctccccagccaccagatttagaagcagacaaggccactgcctgatgtctcatttgagccctgggcaactgcatctgaatttatccctcaaggatgatatgcttaagcctctcagttttccttggtccaagcacttcagatgcccaaaaactgatgaacagcaattgttactttctagaggagggagtgttcttacaagaagctcaaatcagactcgtagactgggacttgagagtcctggattccctattgtgtgacactggcaattgcttaacctttctacaccttttctgtgtcacacaattaatcacattggccataccactcccaagaggcctggatgtgaatgtgaccatttaatgagttcctcagccaaaaagcatttttagtctgtaatataacaacactgtttggggcagggtatttccataagtgtctattcggtgcccactgtggagatttagaggtgagtaagacaaaggttcttccctcaaggggctttcttatggtggcaggagtaaaatgagaatacaaattattacaaaacaaggtagaatatgccagaaattggaagtgttaatattgaaaaaaagaaagcacattctctcaaagaagatatgagaaagccttcatggagggaagggtatctgatgtggggtgttgaagaacaaacaggatgttaataaacataaataaaaagaaaacctttcttgttgggggagtagaatgagcaaaaacatgagaacagaagaattcagaaagaatcgggaagagaacaagtggtccagtttggctagatcagagaaatgtgaggaaaaggtgggatgtaaatctgtacagacaaggtggggccatattgggcaatatctccagcatcaggctgagaaatctgtttatgacagatgggaagcagaggtcaaaaacttcaaagattattttattcatccagtgttagggtaggaacgaaaataagaagaaaaaaaaagaaagaaatacagatatttgaaaaaaaagaaaagttgccccaaagtaggtaactatttaaatgagaaagggagaagtctaaagaatactctcattgttttcagcttcaatgactatgaggctattgctccctttatcagaagtaaggaaatcagaggggaaaaaatggtttgctgaaggaagtgatgcttttagctttgaatatgttgagactgaaggtgctaagtcaacatccaagtggacatgtttcactggcagtagaaacgcaggagagaaattggatactaaacacagagatctgtccagtgtctattaataacagctgaagccatgaaaatgaatgatttcccagggatatataattgacagagaaaagaattaaagaaaacatttcactggagagctaaccaggattccattctgtgttaaacagtcattgttattccatgattacaggcaaaaatacatgaaattcatttccccatgcctcaatggctttggtggggacaatctacaacttggtatcaatcgttataatatacgtgactcctaaggccctgaaggtccaagccatgcaaatatcctctctagcctgtttctgtgagactcacacactcttcttgagtagccaccctttgtcccactgttatttttcttcattctataatttggtgaagtctgttagcatccatttcttttcttgattcagtttttcattcattcatcaataaatattcattgagtaacctactatgtgccaggcactattccaggcactgaagaatcaacaatgaaaaaaattctcaaagagcttacattccagtggaagggacaaataacaaaccaatcaataaaccataatattgtaaatatcagagaagtgaaggtcatgaaggaaaataaatctggctaagggactcaagtgaagtaagctgcactttatacagctgggtgatctgggaaggtctctgaagaagaaacatttgagcagagacctaatatttccaggcaatgagaacagtaagtgcaaaggccttagagtaagagtgtgcttggctaagagatcagcatatctggagcatagtaagcaaaagcaagaaagataggagatgaggtcagagagtcatgggagctagaccatgcagggcctcacaggccatgttaaggaatttttactttaagtatgttggaaatccaatgaaggattttgagtggtagagtaacgtatgaaaggctctgcaaaatccagtggtcatccccctaaaaaataaaaaattttaaaaataatttttttaaagctcaactttgtttaacccagcattttccaaattcatttgacgatgactagagcaatgtttttcatgggacctattaataatccatagaacatatactttgggatgtgatagccctagaacagtgcttctcaaattttaacctgcataagaatcacttggagagtttgttaaaatacagattcttggagcccaaccccagagatgctgagtcagtaggtccagcaggaggctggaaaatttacatttctagtaagttctcaggtaatactaatgctgctaatccatggactacaatttaagtagtattgcctatgacaaagagattaatacataaatacaaaactagagatgtggttaacaaaggaattcaggcaaattcaactgtgcctgtcctttttacctgttttacctcttcacattgctagaagcaatatgagagcatcagatactttctttcatctatgaaaaataggccatagatcaaagcctgactttaagatggttttttcctagagtaagacatactttctcaccttcttggtcctcccttgttgccatatcattggtaatccaactgattaatgaggaccatgtaagtttccagaaaagaccacttggttgggctcggttccattggcataaacaattctattagtctttttttagggaccggaggaaatgttgccagtagcagaaaattaatacactctctaatacaatgattattgtacttgagcaccaccagcaacaatttcaaaaacacttctgggccttggtctcaataagaatcatgacaaactccatcttatccccaagcaatcagagctttccaagaggaagtttatcataactacttcctccatcaggcatctggccactaagcatttaatgacaccttatataggaacttccaagggcctgctacagtggtcctaagcctctctaagaaggatgctaagcattatttttttctataagtaggaaattctattcataggtagttacatagtaaagggtcaagagatacactaagcatttctgagaaaggagagaatgtttttggaaattcagtcagaactcagaaaattttaataaccacatgggaattctaatgaaacttaaaaaggtgtgaattatgggaatatgtaaattataatagaataaagcattgcactatatttcagtttgacttgtataagtcatccctgtccccatgaaagaatttgagatttggcaaactgaccttgttcctgccagtggcctaagtgaatcataaataacttgctaaccagctatggaaactgcatctgtgcctattccagcactgcatagatctagcaaagacaaaatgataaaggagcttagttctctgtctcctggaataaggtctagactgtagcaaacccacaggctattccttcacaggattacttgtggggtcaagataaattgtcctattggaggatgttatgagatcaggttgaggaagactgagctggggcaaaatgaattcaccaaaaatccactcctctttccacagcctgaaggttgacactctaccatcctttgggtgggagcaggataggacccctttgcaataataaagcatgttcctggggtcctacaagcattactatttacaaagttcccaggaacagaaggaaaagcagcatcatgagcccttagaaactttatcaggtgacgtggccccttgaggacttgcctagcctgcacagaggaggtcaccctgccctgaccttgtgggtgctcacaactgacagccggcctatgacaaggaaagttggcctttgttgatttccttggctttatgatttaaaccaattggactagaaagacaaaaaaaaaaactagggaattttaaaaaataatagtttgaggcctggtatatatttcatttactgagcttctgctatatgccaggtactgtgctgggactgaaccatacagacattaataaggcaccatctgcccatcacaagctcaaaatccattagaggatacaggtatccctaccgatattcttcataaaacgaaagcactcctataagaggcaggctattgagtttcaaaggaaagacatctaattcttccttacagagataatacttgagctgtatcttgaaggataaacagacattcagaatgggaaagaaaaggcaggcagaaaaggaaaacattttaagcagaagggacagtatgtacaaaagctcagagacctgcagcctgattaagtacactcttaatagctcattgtgatggatgcttaaggcatctgaggaaaagtgacagaggatgaagctaaaagtttaaaagatcaaaatcatacatggctacttatataacactaagagggtatgactttatcccgtaggcaataggaagcaaagaaaagattttaagaaaagggatgatgtggtcttattagattttgacagctcatggaggactgattgcaagagagtaaaaaacaaataaatcaggctgacactggatatcatgagacaattaaacaattaagagactacctcatgggtccacctggtcatatctcacaggtccatgagtccaaaccaaggcagccttggtgggggtatagaagagagagcagagagatgaggaatttaggagttaaaatgatggaactttgtgattgattggatgtggttgaagagcaagatgaaggagccagagagtctgaataagagtgccgagacggataatgttaccgtctactgaaatgggccataggaaggaggaacaggtttagggcaggggagtgatggtgaggtcagtatgacaaatgatgagttttgaggaacctatggaatatctaggcagtgagcctaatgaaatccaggccacaggcttgcaagaaatggcatagtgtcaaccttcatccctaatacccattttacatgatttaagagatcattcctttattccacctgtcaactcattcactactaggaatctttagaggggcaccttgtgccccagttctttctgacaccttggcaaagactcattgaactaaatggaccccaggaggttatcttgttgattccttggcttccaaactaggccacatggcccagactgattaggattttagtgagttagatatccttaggaagaatattttaattccagtcctgttctaatattctaatcactaccactaaatgcctcattctttcagggtagtaaaaaggtgtggcagaaggacaaacatttattttgtatcaggtatgtgccatatgctgtgctgggcactttatatacattgtattacttaatcctaggtaggcattataatccctgtgttagagatgagaaaagtgagactcccagaggtcacgtgcccactgtcacacaggtggtgagtggcagaagtatggttcaaacccaggtccgtcagatggctaagcccatgtactttccactgtactatattcctagtgttgatgccaaccttatgttagtctgccactatcttatgtagaaaaaagagggagaaaaataccatagaaaattagtcttagtctgtgaattattaacaaatcatgtggtccagctaatgacattattgtagccttataccattttatccgtaaaatgcatgagattcacatttttaaaaattagaagcttccagtctgtctttcttgcctcagttatggctaccaaatgtatcattgctaaaccacaaaagactatgttaaagtaacatttgttaaagtaacattaaagggtctggatttaaaaaaaaaaaaaaaaaaaccacaagagcggggaaactgaagcgttatagttgaaacctcctcataactcacttgtggtgcatggcatggacagtgtgggtgctgtgagaccacccactgatccaggctcccaccacagggacacaacaagagaaagctgtgaacaccccggcttgtaagaattcagatcagactgatagtgtttcttttaaagaagttattcagtgcctctccctatttttccagtcatattttagaaaggggaaaaaaaacaattttttttttttacctcttggttcagaaaggcagggtttgagacacttcactcttgtcactttccagccaagagaggacatctgtcaagtgctaacaggacataatccctccttgaaaggcataaagacacattcagggagctactagggtcaagagtaagctaaaaagtcattgagattccttcctgtggagctgccaggaaatattatagacctgaaacacctttccaaacaggaaaatcaagcccacagtaaaggaaagacaatggagaaaagaggagccttcgggtgaagggtctgcctcttcagatccattcatgcatttatttatttattcatttggtcaataaaccttaattgagaagctacaatgttccatgtttcaaggacataaaaattaataggaggcatagttcctgccctcaaagaaatcacaatctaatgccaaggcagtaaagtaaacacataagtacaatgtagtaggataagtgtcatgaaatgtttagaaacaaatgctctaggagcacaaaagagggagaaactagttccacctggcagggagatgtcagtgaaaactttgctgaggagaaaacatttaccgtgaatcttcaagtatcacaagttgacctggaggtattagtaaagaaaggtatgtgaggaggaggaaaaggcatgtttcaaagcatggaagtataaaaggactcataataagttcagcttgaccaaagcttagggttgatgaggaactagggctggaaggtggcagcatgagggaaggtatgactgaaaatattctcaaatcctagatcacagggagttttccttatggagagatgtttggattttgtcctcaggtccagagggagctctgtagaagtctttaagcagggaaatagtatgagaattcgatcatttgggagaagctccatagcttgtcatttactgagagggcatatgaaatcagttctctgtgtcaggcaaaaaaaagtgctaaacagagcagagaagatgagaaggaaggatctgacaccacagagaaaaatcaaaccaggacagaggcctcctgagttgagaaaaacctccttgaaatgaggcatagctggagtaaggatggatcactcacactctcaccccattcttctcttctacttccatggaaggaaagacagagcacactgccctggcattcacctaagatttatccccagagaaaaaaaagcaaggaagtagtagccagtggtaacatgggaattgtagggtggacaaaaatctctcaatatgcagaaaagtagggcttcctcattgaggtgtagagatgaccaatgccccattttgaggtagtgtggttttagcttccctaaatggccagatctgggtctcaggaatcaacatctaattactacctgtaattactacctgtaattagatgttcttcctagaattcctcactaaagaagccagaataaaaatgtttcaacagacttgttgggttgtaacagccctatttccaaagcatggaacacactggtacaggccagaggtaaacagagtaaaagaggttcttgaagaatgagtctccaaattcatcaatgccctggaagaaaccagtactatgatagtctgaatcagggtgctttcctcatcctactagaatccaaagttacggtataagatcagagctggtcagagaagtacaggaaatctgaccatctcaagctgcctataccaggctcaatcctacactgctctgttcctcctgaaaaaaggaaatgatggagacgaaggctggactctttcctgtgatatctgtccaattatctgttgagagaagaaaaccaagtctgctgaagacaagaaatggtctgtccaagcaacagctcatatcatccatccagaggggccaagaagcggagaggcagaagaggatcaaagcctatcataataggcccttggggaagttttgtagtcagaccaaagacactctgagaaaagcatgtcttctgtcttctgggggttctggccttggaaaggagtaggcaagatatgtactggaaatcagacatgaaaaccaaaactaggtttcaaattgctacttggctttttttctttaaagtgataagcaagcttattttcccagtatgtgtgtgtatatgtgtgtgtgtacacacacacactcaatcagccccaactttagggaaaagtccacataactgcagctttagccaaccccacttccccataccttactaggagttggtaaaccttaaaagggaatactgtctgactaaagccagacaactggccccttaagagcacatttataatttatttatggcttaatattttccactgataggattaataaatcatgttttcattcaacttgttttctctgaggtatgaatttctctattttgataccagatcttaacatgttttattttgcttgtccattttccagttcatttttgcagctacagagagaaatttattagtctgtattgccgcctttctgctgttgtggagctggattctctgaacacccaacagtccctcagggaagcaatctcagacagcgaggttgcagctgccaaacaaagacaccagcaagttttagatttcattcaggtaattgtttgttccttctggggtaaaaggaagggagaagaggcagggtggaaagggtgaaaagccaagcatgggaaaggacagcagtccaggctgattcaaagaacacggtgtgtaagttgcctattgagttggttaaaatgtggagctcaggcagataagttttcaaacaaagccttaagaaaaagttacagataattcacaatattactaagaaatgttatcagtcaccatggtgggtagtggtagctttccatacgggagagaaaaatcaccccccagaagcagtaactagaatattattcttaccttgtagcccattgacaattctaatggaaagaaaaattgtattaattaattcaatatctcagagaaaaagaaaataaaatgacctaccagtttatgttaacccagatccaattagaactaaaattcctcatgttttgggcttctttctcacagaattgacactttaatatgtggctgttaagatcagaaaatgtgttccccttcccatggtcttttctggtaaagcctatggtaacacctcagggtcttgtgaaaggggtactgactagtaatcaagagaatttggatctggcctgaaattgcctctgaatcccttagccaaatctttcaatctttctgtccatcagttactcaattcacaaaatgagtagaatagcaatagccccatgataaatatcactatgatacatattcagttcaatttgataaacctttattaaacaaccaggtgtcagacactgtgtgcgagacataaagttgaattagacatggtctctgatcttaaggagtttcaaatccatcagggtagataagaaatgtgtgtaaatacaatttgtaaaatgtgctaggtgccaaaaaaaagatataccaaagcaaaacaaacaaacaaacaaataagttttgtgtcagcacaagaaagtaaaaatttactttcacttgtatcagaaacattcccatgaaggatgtaattgatatatagcctggcctacaaggataggttagattacagtaaggtgaaacagaatgtagagcattcaaagagaaagtataaacagatgaggcagacagagcagaaaaatagtatttggggaatgataaatagtcaagattggttggggcataaattgagtgatgagaggtagaaattaggcaagaaggaaagatgtcaatgatagcagatcacaagggctttattaaaagccatagttaagaaatctgtactttttttctgtaggcagtagggagctacccaaagttttgaagaaagttaagtcacaggctctcaaaactctgtttaggatagattcaagcagtgaggatactcttcccatataattggtacagccatactggttgtttattataagcattcactcttattggtcatgctcaccaaataaggatttgagaagactaaaggcagagaaaccaaataagaagctattataactatccagacaatttgttatgaggacttaagatgaacgaacgctgtgaactttgggcaaagaaatctctctcagtcccaacagtcccaatctcctcatctgtaaaatagggatgataataatagggttatctcataatgttactgagagaattcaatgagataatacatataaaacactcggcaaaatgcctggcacatagtaagtatgtaatacattatatattcattcattcacaagaaggagaaattctttgacatatgaatatgtgagattcgaggtgtttgaaacactcaggaagaaaatattgtaatttacttgcaaagtggagagcagaaaaatctttaggattatcctactttcctcatcccgtgaatgagatatcttaggtgacctctcagaatagagaaagaactttcaagaagttactttctccattggtctgagaatgtagaatttaaacattcaaaacatttacttcattgatttcatttccagtaaaaatggaacacagatggtggggaaggggtgggaaaaggaagagtgtagcatgaggagaatacgaaagactggctcatttttgaaccccatataaaggatagtggagcatagtaagaataacaacagatcagaagctggtcccagaggaggttgggaggctgagatggtaggatctcttgagcccagaagttcaagaccagcctgggcaacacagtgagactccatctctattaaataaaaataaaaaataaaaagaagtcaaggagcacacatttttagtcccaaatcttctgataaactctggagtactggacaattcatttgatctctggggacctcaatttcctcatatgtaaaatgaaagaactggactagatgacttctgtgggtctaattggctctaacgttttatgacttaacaaccagagatatttttagaggaacacttctctacccatgccttaggttctgtttctgccttattccacttatgcctccctgaatccagtatgttcctccaacaaggaggctgactttcttcagtctgttgtgttctcaaactcctcccagagttccctggctttattcctactccctgactactacccttgctcctttctttttcatgtagcctagggctccactgcctttttctcttcttttatgtcacaccattaagtgggttggataaaggcaggccaggctgggaattcttcaaagttctagcccgctctggtctcccaaagcaggtaacttgagagccctctctacatacttcccttccagtcagccaggtacacacagacttggataaaagccaattctcaaagggttcaaaatataacttcttggtctgggtaaaacaagaccatctccctacacccatagccttcaatgaaccaccttgcttctcccaacatggataacttcactgagtggagacaattcaatatcatctctccctttatgttgactttgtggtctctctctctctctctctctctcactcactcactcactctgtctctcaaaatgaaaaccagctgtagccactcacccattggtgttcacagctcagcccaccacacaccataacctgcagaagtgaccgccagttgtgagagcatttgtatgattccagatctaagacagtgttgaagtcactacacaaaccaaacattgtaaagagcaagggagtctatgtaaatacagttaggaaaagaagccaaggagtgcggccagaaagggggaggcctgggccacgggaggtgtagaaaatcatagataaggcatacaggctttatagacagcacatgcagcagaaatgtcaaagtgtgaagacctggagcttggcatattttgagctgctaaagcctaaagggcaattaggctataatttatatactgtaatgcttcaaatgctcctaagctgtaatagaaacacagctcattaaatatagccaatctatcatccccttgagcaccttgtagctgtgctgtgagaaaaccaatcacctttacattttaataaaaatattatcttgcctgagtaaagagaaaggaatataatttacgagatgaaaactgaaatttttaaggggcagggtgagaaatggatgcataacttttaatcaacagacctagggaattcatggtctttcttttttaaaatgtgtcagcaagtctttagaaggtgaatttggaccttaaaatcagggggattatgttgtcagttacttttagatcagcagtataaggtaaaatgggtgaaaattggccttcttttggagcaattagctaagtctcattaaactcaatccacaggcctccctatacccatatggtttttaagttttttcttcagttaagacctcttcacgtcactgagaaaaattaagaagtaaatattgtttctacatacttttaaaaaaatttctacgctaaatccctctattcatcctcagcaataaagctgaaacaatcttatccaaagagagcaggtagattatttattaataattatattggcctcctagggttgctgtaacaaattcccataaactgggtggcttaaaataacagaaatgtattccctcacagctctggagaccagaggtttgaaattaaagtgttggcaaggccacactccctctggaggctctagaggagaatctagtctctgcctcttcagtttctgatggctgttagcattccttgacttctggccacatcatttcactctttctgtactcacgttgcctccttctcttatgtctgacaaatctccctctgcctcactcttataagaatgtccttatgaggacatctgttgttagaattaggatccacagagaaaatccaagataaacgcctcctctcaaaatcctaaacttaatcatatcttttgccatataaagtaatatttacttcgtatcatatcaaataatattcacaggttctggagcttaagatatggatgtattatggggggttccatattcagcccactacagtaatcatgattgtcattataaaaactgaaaattttataatatgtaattgataaagtacacttatctatattatcttacttaatccttataataactctgtttgtgggtagagatctaaagaattagatcattcattcattcattaaacagtcattttttgagtacatacctactctgcaaagctgaaagcaaaaaaataccaaaacacaatccctgtccttgtcgggcactctaaaagctatccacagtcatgcggtgcctttaaaataactttcaacaagcttatgttgcatgaggtagggccagtaaaagccagctgagagaacaacaatctcactgggaaaattcatctgagtctcatctgggattcccactttggctttatccccagactttagatttctcccttcaaaatggcttagtgtctcctcatgggcctgcctactgctgaacttcctgcccaactgaccaagctaaaaaagcctgaagctcaatctcatgctttcatcactggccctgaatactctgctgagtcttgtcaccacaggagtggcaagaactagaaagcaggggaaaacggctgtaagaccatacactgccattcactagttcactctagctagcttttcactcaacttggcggactgaatgtcagacctactgtgtgtttgttgggaggaccaggtttgtggatattcttaatgagtaggttttaagtacagattaaaggcctatcaagaaattttgaaaataaaatataacactgggtagtgttttagttttaaaacttccacaatcagagagagagattaaccttgcatgactcacataatgaataccttctatctggaagttaggtaataccaaatttccaaatgttcctgaaaaataaatcctaaagtttcagagctggaagggaacttaagcatcatgtagactaactacctcttcttacagttgagtaaatgggccccaagaagttaatggcttgcccaagtcatcgagtgaaattaaatagaaagcctactacaaattccagggtcataagaaaaaatatgtttaaccaacagcccctccttgagatggaataacaaaaaagctcatggcccatgtctatcaagatctggaaaactttcgtcatctatatatacagagagacacaaaaatctgagtgaattttatgcaaataggcttcaaggaaactactattgtactttataatgaaaatatcattaaaatgactttgataacccaaaaatcaaaatggaacaacctaaaatggactactctagaaatgtaaggatgtttaaattatttaagattaaactgttaaggccgttttgaactttagaagcccttactctatatgtaagaaagtagtaagtctaatatatgaagttaattattttctattaacataggtccaaaaacctctacttagcaaaaatattccagtagagctttgcttttctagttcacatataagaactaggactacatttctttcttaagatattctgaaattcaggctttatcatatgccttcacaatatcttaatgaggaatatttaattataatctgggatataataaccctttatatgtatgagcaatgtaccctgaggcatcacaaagcactttcgaattcattatttcaactaatcatcccagcaaccctgggaggtataaatggaaaatgttttggccacattttacaaataaagcaactaaggctcaaaaaggtcaagtgacttgctatgagttagtatagtgctaataagtgatatattccagctagcatctaagtcttctactattttcactaaatgacagagcttctctggtaaaaatacgcaaaacaaaaaatattacaaaaagagaggtattttctggcttaacaaatctatgttaaaaatattttactcttgctcaaagccaatattgcggaaaatggatcatcttggactctcagggaaatgtattcctttttaatcactgcttgataacttagtgtcttttaccattttattccaaagcaaatagatgaagtctggcgtgaaatgagatggatcatggatgctctacagtatgcaagatacaaacaaccagtttctggcttgcccatcactaagctgatagacccctcagatgagcagagcctaaagaagatcaattctacatcatcatcacatatagactgtcttccatccccacccccatccccagagatgcacagaagaaagacagtgagtggtaagcaatgagatctgaagttctgttgtttagtccctggacttttgatcctctcttcactgatgaggacttttatgctgaggtattggttccagaaagtggatgaaaacactgctcaggggtaagagtctaacagcatagaggaaacaaaatcagaatagtagaggaataggaaaactagagcagtaacctaagatcaatgccatttagggacagggaagagtcattccagttctaggtcacacttacaagatgcaaaaggatataaaacagggatacagcttcaaagatgcagactggggaccactgtgatgccaagtgagggccacaaaagccaagggaatctgagcaagacaaactaaggaaagagaacaggcccaacctctattaaatagcatctgacaagaacgaggcaggaaacaggcccaaacctgggtgagagtttgggaaaaacttcccatccatatagcacaatgttctagagtggaaggtgggaaagagagaaaccttggataaactagaatcctgaaactgagtccatgtaagtagcttggcctcatcatggacataatgaactttaaacaagctggagaagatacctagcaaggcacctctccacccttgagtatgaagtctaacagcaaaaacctgactgggttaatatgaatttctacaaaatacctctatgcttataagcagaaagaaagcatactaggtaaaggcaataaaaagctcttagccatgctaaggctagtgccattttctagtcaattaaagtaatggcgattcaaagcatctttcttgattctatagtttgcaagagctccaattttgtaagcttcataatatttttaataaataggcctgatttgtggatttgtcccatagggggcagcatggtgtaacagaaagagcttgcacttagaaatcagagacctggattcaaatcccagctttgttttactagctgtatgagcttgaacagattactacatctgacactcagtttccatgtatgtaaaatgagaataatacctataccttgaagagttacttgtgaataaggtaaactatatcaatgatgcatgtcatataatagacaatatattgtcaataccctatttaatgttatttttattatagaaaactttactgggaatctgagccttttctatgagtaagtttgtgtctgcacctatatttttaaaactccaatgtgtaaagtcaaaacttggcaagtggaagaacttaggagacagctaatttacattaccaaaggagtctatgacttaccaaataacaaaatatttaagtagagtttctagagtgcatttttatagactgccactgggctagagatacaaatcaaatatcatctctgccagaagttaggctaataagagaaacagatatattaacaaaaaattacctggtaattgcctacctgctatgaagttatcagtattaaactcttatgatcaaagagagcctcctggaggagatgacagaatctggtatgaaggataagcaggagttgagcagaaaaacaggaaagagaagagcattataggcagagaaagcagattgtacaactgtttgtagtttagggaattgcaagcagtttggctgaaactcaggatctaagaacattgttcattcttttctttctatttaaaaactatatatttactggccaccctctatgtgccaggctctcttcgaagtaacagggatacagtgatacataaagcaaaatatctgctcccatagagcatacttacattctagaaacagggacaaagagtgaaaacataaacaaacaagataatttcagatcgtgaaaattccagtgtataatacaaaacagcagtaggggtgggagtaggcaggaagtgtgttgaattcactaggatgatgatcagcagagacctatctggaaagatgacatttgaaccaaccccagaagaagaagctagtaatgcagagttctggagttggaatattccagacaataaaacagcaaaaggccctgaggtaggtgagggacagaaagaaggccaagatctttgacacacagtgaacaaaagggcggatcgtgagagacagggtagagagcaagacagaagccagaagccagagtaggcagggttctgctggtcatagtaaaaagtctggattttatcccgcttgtgatggaaagccattggaaacttttaagcaaggattgatataatctgatctgtaaaatcaaatctggttgctgtatgaagagaccataagggaaaattattgaagcagggaggcaacttagaaagttattaacaaaggagacaccaagttttctggcttgggtgcctcatggtatcatgatggcacttgccaaaaaaaaaggtaagagagaaggaaaaacaagcttgggtggttgggcatgttgaatttgcgttggctttggaacattccgtaaaaaagaaacattcaggagaaaacaagctgcatggagtctagaactcaggaaagaaaactgagctaatattatagatttaagaatttgtttacatgtgaatgatgtttgaagctaggaaaatgcttgggattccctggaaagaggaggtagaataagaagaggagactgtggaaggatccctgtggaatggagcatcaagacctattagactaagaaggaacaaccagagaaagaagattaaaaaaacaagagagtagtggcacagaatcaaaatgtgtagagaaaggttaaattcaaaacctgaaaagcttcagttgttttgcttttctcaacaaggaagtcatcagtgatctagatgagagcagtttttgaaaagaaagaaatagaaactgaacagaagctaatcagggattaaatgagaggtaaagaagtaggacaggaattttcactcttttaaaatcttggctgcaaaagggaagaaggagggaaggtagtagctagagaagtgtagggttgaaagggcattttttaaggcaggaaagctatgtatgctacgatgtcccacaatttgtttaactctacaaacaactcttcatttctatttccaccttcgcagcccctgtctgccctctcagctcacagaaccttcccagtgtttaatcttctcttggccacagggttcttagtggattcctccctggctgtatgagggtggccttctctatgccacagaagtgccaaactctcacgttggcctgaagacgggttgcaccactccctgctaagaggatctggccaattacattcagattttattattaacttaaaatgtgagcgatcatcattctgtttcttaaaatataacgctctcttgggtccatttacttcttggaagccaagattccatgagctatgaaacacaaagatgtggaaagcagcaaatgacaaatggaacctaatgatggggaagtgctgttgaaaactggggagaaacatttagtgtcctacccctcacaaaagcagaagcatttcagagcaatgaaatctgtcactgcattctctgtccttcccacaagtgtgaccactttgaattgttcaaaagccatttatgaaaagggggaaatgcaatttagaagaacatacctgctgggttacccagagggcaaagtttgcagcataattccattctgtgtgtataggattcactaacttcaaaggagcctgctagaaatatagagcctatcacaaacctagcctctgatgccagcccaagattctgttttaaggctgttgagtatcttgaattggtttgtgtatatcttttgggagtaggtggatggagaatggaactctttcgcttacttcccatttctgtgtggttttcaaaacacaaagtagaactcctgtgcgtcaattaaaattaagcatctctcaaggacccaagggggaaagttggcttctagaaaatgcagctcaaggcagggagtggaatgatttggtccatcacatgggtattttggtgttttctctcccgctccttttctgtggatatagtggtcacaggcagcagcaattttttttttttccaatactgctgtttctcctagtgacacatgggtgaggcaatagaggggaggggggtgttgtttccttcagatgcatttgaaggttatcctgatcttccaaatgtaaatcttggtaacctttttccagatgatgttaagagtactatggcataaaatacacagctcaaaaaaatcaacaagaatctggagatattatttctcttgggatatcagaaggtgaacaaaccccggaggttctactgaaggcctgatgaaagattcaataaaagtcttcatttataaattatttaaagtctactcaaacacagtggaaataaattcactgaagcacaaatttcatatatatatatatatatatatatatatatatatatatatatagacagtggtacattaaaactgtgaagatagatttttgggcaaatatggattattattcttttctttctgttctgccatgccccctgcctttaagaaaaaagcaatagctttaagtcaattattctttcctgaaatgtcatctccccataacgccctcaaaatccacatcaactctactctgctgttgttggcctgacccacagagaccaggagttacaacactcattacaatggcaagaaagccaagcttcctaagccagcactaatactatgagcagaactttcatcaaacagctcctgggtcaaccagaggggaaattcaaggttttaccagtcctggcctgcccagtgggccctctcagggaaattgaggagcataagcaagtttattaaaataacaactgggcaaggtgcctacagtggttaatggagcatatggcctgaatctggggatggaagctgcactttgcattcttttccaggaagggagggagcagcagtggcctaagtccttggaaactctcctcagtgccctggctggcatcctggagattttcccagactgttctgggaggggtatcccactctaagcaataggttccactaagtcttctaataaataatacaatcaccatgcaagtcaaatatttagattcccactacagcagtgtttcccaagtgtgggtccatgaaccaaggagataatatttaccccttaatattcaagctcttttgtatctccttcctaggttaccatgattataactaggtcttctcttgaaatcaagagaagctttaagtcaatagtctttcctgaaatgtcatctccccatctttcctgaaatgaaatctcctatctctcatgttctgggagctacaggaaatcagttatatcactcactaattcactctaaaatgtagtttaggaaatctactggactagatcatcaccagcagaagataccatacaagaaattattattcacctttattatcaacagcattctcaccttgaagtatatctgattactggtttatattttaatgatcttaatatgttattctctatttagggtgaagagaatttcaatattaatatcttctgtttttaaggcacttaaagcatcttttttttcttttttatgaggcagagatttactctgttgcccaggctggagtgcagtggcacaaatttggctcactgcaacctctgactcccaggttcaagtgattctcgtgctcagcctcccgagtagctgggattacaggtgcccaccaccacacctggctaatttttggatttttttttttttttttttttttagtaaacacagggttgcatcaggttggccaggctggtctcgaactcctgacctcaagtgatccacccgcctcggcctcccaaagtgctgggattacaggtgtgagccaccgcacccagcccacttaaagtatctttgacaaactaaattactcctcatagtacttattcatagtaccagttcacagaagctaaatgatttgctcaagatcatatatgcagtagttagcaagacaggacttcagtccaggtttctctaattttaagacaattgttctttctgctatatttgggctggctcttcagtcaaatatcagcaaagataaagcaaaattatctgggtgattgtttcaggaatcaatggtagattaagtaaattagatcctttcaggatgcgttgcttttagtattatttctaagagacagtcaaatatcactattcgttatgctcccagatttcaatatttgtttcagtttcaattccactcaacatgctttactgagagccttctatgtaccatttatagcacaagaggttactaatacaatgatgattaagacacagtgtagttgggaggtcttcatagtccactcatatgtccatgttcagactatatgatctgggaaatacaaaagattctacacatccctttgcttaatttgttccttagtccattcctttgttgactgacttattcaatatttactaagcagagatgagtaagacatacatactgcatgctctctagagttcatggtccaatgaggaagacaaataggaaaatggataatttataataaaacttggtaaatgcagttacagagatataaatacaatgctctaagaggcaaaagaactgagcaactaactccacctggggaaaacaatacaggctttccttgagagactgggtcttaaaatatgatactccattaaaatattacactgtcagctcatttaaggcacatttcgtatactccttagtcccctccaaacagtatgttctcactattcgtatgttgggagatcaaaatacagacagattttgcaaagtgcttgactatggactgaaagtgttgcaaacttcagtggttgcttccagttctagtaatttttactatcagtcttctactggcccccaaaaactatgtccatgtctgaaccctcataacctatgaaagtgacattatttgttttttttgtttgtttgtttatttgttttttattatactttaagttctagggtacatgtgcacgacgtgcaagtttgttacatatgtatacatgcgccatgttggtgtgctgcacccattaactcgtcatttatattagttatatctcctgatgctatccctcccccctcccaccaccccatgacaggccccagtgtgtgatgttccccttcctgtgaatgtgacattatttgaaaaaagggtcattgcagatgaaattaaagatcttgtgatgagatcatcctggattatatgggtggatcctacacccaatgaaaagttcccttataagagacagaaaagaaggcacagacacagaagagaggccatgagaagtcagaagcagagatagcagtggcatgctcacaagaaatgctgacagccaccagaagctagaagaggcaagagaaagtattctccccctagaacctccagagggagtgtggccttgctgacaccttgatttcaaactcttggcttccagagctgtaaaagaataaatttctgttgttttaagccacccagtatgtggtaatttgttccagcagccacaggaaactaatacaagatctagtatgtttctctagtagcagcaatgtcaagaagccctaagagtttaagtaatttaactctgtgtaccacaaaaagtgaattagatgaactaagtgccactcctcaggaagtttccacagagagtcatggaaatgctaaggtggatggcagcatagcaagtctttgtagtgagacagatttacatttggctgcctatgctaccacttatcaagaatacaaattggaaaatttgataagcctaagcttcagtattctgatctgcaaaatgagaattgctgtaagtgttaaacaaaataaagcattcagagttcttagcatcatggctggctcacagtaagcactaggtaaatatcagatattgttattaccattgtggatacatgcacacagctgaacacactgatcagataaatgaagaagggagttcaactacagtcaattatgaattctttgcatgggtcctatttcaagagcaatttcaaatcctcagttatgttctcttcttcctcactcttaaggcacctgcccctgctatcatcaaaaacaatcaacaattttgaaatcctattacttgcagtgtcctaattttcccactaaagattggaaaaagtactaaggcttttttaaagaatatcaaagttatttagcccaggtctttatacatttctctccttttaacctggaaatatatgtttcttctttcctaaccccttacctctgaggacaatgtgtccttccatctttctcactaagcaccaatgccagcactggtgctcacaattgatcacccctccttattatattatcaacctcaccactcatatattcaaccattctctctccaatagtttcttcttctccacactcacaaataccttccttcagctttgctacccacatgctctcagttcatcccctccttgatgttttggcttcccctcagctcaacctgtcccaaattaaaccatcgattctaccacccaacccaaatcaggactgaaatttaactcctttagtttaatttcctatcttcccaggaatcacagtttgatatctactaataactttgaggcctatacactcgcttctcccagttatctggaacacttgtccctaaaactatcacatagctggttccttctgatcattgggttcttacccagactcccctttgtacagtgatgcttcctcccctggccaccttatcgaaagcatcttcctcctaagtcactctttcattaaaatccactttcattgtcttcacagaacttcatactacccaaaattaatcttatgtgttttctgacttattgtctaacccactctctttgagctatttgaaagcagagaccatgtctgtctagcacaaaataactgttccataaacatctttcaatgaatgactttcctggacttctattttcttccacacaaccacagctcttgcttagccccacagcctgaacaaggtaaatatttggagggaaaatgtagcttggaccacagcttcccagctggcctccctgctatctcttcctcagcatgttcatcttacatcctagttgctatcctaaatcatagctctcatcttgtcaattcttcaaaattctttgatgactacccactggctacaaaataaggtacaaactccttatctaagcattcagtaccctcctctggttccaccctacctttttaaaaattaaatgctgtttttaaaaatatgttttttgaaataattatagaccctgaagattacaaagaaatgtacaggaaatcccatgcacccttcctccagccccccacaattttaacattttatacaactcatataatatcaaaacgggactacttgtgctctttctttatcctctttgtttctaatcctcttatcgtttgtatatttactattaaaagctacctccagtcatttttaaaagtggatgaagacataaattaatacagacatagagatgaatgaatggagggagaaaaataaatgaaatgatgatagagtatttcatcaatcctgtcccgataaaatataatccctctttcctatatacctacacttatttgctgaacttctcttataaaacctatgttctgccacagtctcacagatgcatactttctttatacatccattaaaacagtaaactccctagagacagatataatttcttattaattttatatccactcaagcaccaagtacagtgcttctattagagcaggatctcaagtaatatagaatcttcattgtgaatgaatggatgaattaaatatctctgccccaagagtaattaaatatctctgccccaacagctggggcagctccttcctaatggaggttatgtttgaggaaaaccttgaacagatcagtggagctcaaaaaggcagaagagggaatccttttattggtagccattatttaaagaacatataaatttatctcatcctttgtagctgctggataatattccatatacagatgcgccacaatttatttaaccgtactcctattggttaggataaattttgggttcgtgttaccaaagacccaaataagaatgtcataaacacaagatactttctctcttgtgtgaaagaagctcaaaaggagacaattcaaggttgatatgcagacgtaatggtcttcaggcaacaagctctatttttcagccccaccatcctagcatgtggcttctatctccaaggttgctccatgacctcatccaacacatctagttacaggcaaactggaaggaaagagaaagaatgtaatgacccagctaagccaggtccctttatgtagctttccagaagtttcataccatacttccatttccatttcagtggccagaacttaattatatcgccatgcttagctgcaggggaagctgaaaaaaggcggtcttttacataagtgcgttggtgtcccaattaaaattaagattttgtaactaaacaaacaataatggatactggataatggatactgggtaacaacaaggagtgaaaaggcaaaactgacatcttgccctgccaattaagagcaagtacgcacatcatctcctacagtaaggaagaaaagcattccttctagttctagtccctaaaatagaagaaaccttgatactgactccctaacaaatcagactttatccatgaattttgcaatattccgatgataatcacgtctgattttccaccatcaacagactaactgtaacctggttagaatgtgggctttttcttcgattaactgttgtattttttaatgagcaaggtagtccttcagaatatggaggtggacggcagctaggatttgaaaccaggtttaccaacttccaccactggagtctcctcttcttcgttcacccttttaaattcctgctactttgtcaaatgcaaaaatcatctctgaaataatagggaatgaagaaatgaataacatttagctttctagcctgtttcatcctctccacagctgcccagctaataataaaagcgtgtgtgggaaatgagggaaggttcctctacttctatctgggctgaacctgtcagagttcctctctttcctttcccttacgctaagaccagagcccactacataatttgtggggtcctgtgcaaaatgaaaatgtggggcccctagttcaaaatgtgtcagcatttcaggaggtgacagcagggcattaaacgaagcacaggccccttctaagtgcggggtcaaatgcactgttcctatgcctgtgaagcaggctctagctaagactatatttttcctaacctcagtttctggcttcgcagattcacagccctgctctgatgaagaagcctgctcagaagtcttcctccccaccaacagtgactacgactccagcgatgccctgagccccagagacctggacctggtctacctatcatctcacgacattgcgcagcagacccttagcggcctaagcggcagcgcccccgacgtcctgcaagtgcacgacgtgaaaacccctctggggccgggccaggatccccagggcgagggcccaaatcccgatcactcatgtgccgagtttctccatagcctgaccctcacggggttcacacccaagaaccacgccaagactgtgtccggtgggcggcccccgctaggcttcctgggaaagcggaagccaggcaagcacccccactatggcggcttcagccgccatcatcgctggttgcgcatccacagcgagacccagtcgctatcgctctctgagggcatttatacacagcacctgtcccaggcctgtggtctggcccaggagcccaaggaggccaagcgggccggccctgcccttgatgatcccaggggcctaactctggcccacgctgccagccttcctgaggagcggaacagcagtctccaggacgcgaggccttccgtccgccgcctctacgtggagccctacgcagcggccgtggtggcccaggacgaaaaaccatgggcaagcttgagcccgccctctggaggccgcatcaccctgcccagccccactggccccgatgtgagtcaggagggccccaccgcctctcccatgtcagaaatactcagcagcatgctttagggaggcccatcccggctgtccacccctccatggctgctacctgcgttttacatcacccttacccccatcctgccccactgtgtacccactcattttcaagcgttttgaatgttataaatacaaaggttacaagttcaaggtcctctttttttggaacagagtggtgggtggaggccagagttgccagtgccattcccacttcagcctagaaagggcatgggggagttgtgtcaacatggaatacgacatacagtgactcaaacatgccaccctgttggtggcacctatgactgaagctggccatcccaaagagagaccctctgttctgcagctggttctgtaatctgacccctagtttagggctctttcatgaatttgtgattgatgaagagaagttctataaatgaaaataagattagcatcatttctccctccattccaaaccttaagaagagtttgagggaaagacaccaggttgtgtctctagggcacggggtcaggtgggcttgaccttggttccctgtcagctaaactaggtcattccaaagtgcagaattctcagggctcaccttatccaatttatccatcagtacttatctgattaaataggccttgacaggcctttttttcttcgtatagtgctgtgtggagaccaccagaaacaaaagtggagaattctctttcagctctaccttgcaaagatagaataggacagaaagtagcccttcctgtatactcagctcccatccaagcatgaaaatgatccatagatttttacaggggtcaaggagatggctaagcaaagtgaaagcctgaattacagataagacaggggagggagagagacatgggcagaaatatatttcctttacaattctaagttaagcaaagtaagtccatgggggctgtgtctctgaaaatcatagtggatcagctccagattctttggtgatgaaattgtcattgaaccagaaagtgccctgcagatacggtcagtcagcaatgggctcctcacaaccccacaggcttatccactcaccctacatcatagatcaaggggcagattgtccagggctagggtggctgcctttccctttcaacctacctctccttaggtcaaatttgcctcaaaatcatctggcccaattggcatcagggaaaatatgctcagaagcctttacaagtggttaattccaaggatgtgctaaaaacatctggaaatcttgctttggtctcattacctcctatctgaatttctcacaggaatccaaattagacaaatcacactgcatattcagaaaaggcacaagtttcctcatctcctggagccaagacccattcacttcactgacattctaaatgatccttttctgcttcacaggcatttcagttaaatattgctctttatggccctatccttgtccacagagttctaccattcctcctcatgggagttcatacaaagtcccctgttcacaatgttattctgatcccttccattttaaaaacatttgatttaaacataaataattaccctgctgcaaaggtacagatttggcccatggcctatggtcattagaaaactaaagcccagagctcagactttatttttttaagagattttatactcaatgaaaccctcaaagaatcttgatcagaatcactacagctcctttttcatgactgggaggattttaaaatgcaattttcttctgtctaagtgaattctatgtgcatggagagtgttagaactagacgggcccataaaatttatctaagtccgtgggtttgcaggtagggcaattaagacccagagaggttaagtaacatgctcaaggtcacggagctggtttagtctcagagttagggtcagaactagaattattccctttatagcaggccgtcccattgggaattggtccacacctagttacctcttgattgttatctacagggaatctcctattttgtagatcatctacctacttctgatttcaaattcaacctttacctaacaagtttccaatattacagagctgcttgttgccaaggaatacagacttcatgtaatacacatctaagttaacttaattaaacagcaaatttgggaaaaacatcatttcaaattatgcctcttagttaataacaagaatggcagagtcatttgcactcagtttctacttatttctaattataaaatggattactttgttcaatgagtttgtgagatgagattctaggattgtgaaaaactaagaatccaaggtatttcctgatcctgatcattctggtggcataggaggaagtttgtgactgaatcaggtgggaggcattcaacaaacaggagaggcagaaactgacccacccttctgacccctcatttggtcagtaagttctggcatactggaccaaaactgcattaattttaaacctgctattttatattggggacataaggttactttttcatcttctgtgaggaaagaaggcatgcccacaaaaagaataatgcatgttacattttaatgggcatagttaaatcaattgaaaatgcattttcttagcaacattcttaaataaaagtgggtatgttgtagcttccataattagctattattcaggtaggtttccccataccttcactttgcaatattttgtgagcccagtttaaattaatacattcttgtgagagacaactgtgttctctaattcacagtcctttattcatttggccgaccttctacttacagagactttacaatgtctgaggatattttgttttattttattgtttttgttttgtttaattttggatacaatggatttttgtctttcactctttttttaatccaatatgagagcctctgaaggaaactgtcccaggtcttcttttccagggttttctaacatgcttgatcagctttcatcatttgtgaaaatcctcaaaaatccttgactgaggttctcccatatgtctatctcaattctaagtcccattgagatccaaagaatcaagtgtgaaacatagtcctaggccacaagaagctcacaatctgatctaagaatgtagccatacattcaccatacatcttctcaacaatctcttagaagaggcaggagcctgtctcctcagccaggcagacatagtgcatgttgggctacatctttgatttcttcttgctgtacagactcctgagggagtacaacctggaaaatgcaagtcatggaagtatatgtttggcaactacttaacaaagctaaaacatcctcttaattggcgagggtgcctgggagacagtaattaaaaacattcactccagggaatgagtattttaagaagtaggtacttaaagatgagagccattccctttaaagaacattcactaatgctcgaagcaataattacactggagaaattgtttcatttggtttgaaaattgaagcaagttagtaataatatttcgccagtcctctttcctgaaggatcccaaagcactttatgaaaagcaatgactgaagccttgttgtactcccctaaagaaaccttgtccaggagccacctggcaaacacctactgtgtccttgccaggagatcatgccagagaagtggaaaagaggactggaccctcgttcattgttatcctgccacacaaatgtgcgccctggtgagtttggagctcttcccttgaagataactctgttagacgaggaggcatcccagaaaatacctgcttggcctcctctggttcttcatcctgcaaccaagatgtacttaccttctcttggagaactcacttaacagcttaagtgagttctccaagagaaggtatgtctgcaacgcatttaagttgcctagttatgtcaacaagacacagaattcactggcttctgaaaatgtacacatgttaggaaggtgatgacatttttctacagctctctcaacttcgtatgtagcagagctacagcaaagagtgtgtatttcttggtatatgtgcttattaagctatcacataccaattagagaaggtagctgtagattaacaaaggaacactctctgagaatttaaactgttgcatggtcactttacaaagtctaaatatttttccagatgatttaatgaagcaaacctggacttttttcttcaaggtcgtatcttcaaggaaatttttaaaatagctatttggaaagcaatggtatctcttcataggtaatagggtgagcaaggaaaaaaactgttttctttgctggtcacctctcataagatgttcaaacacatggcttatgactgttaagctaaacttcaatgcggccttacaaacaacaagggtagtgtatttgaaaccatgttgtaccacttggaaacttattctaagatcttaattcagactttttctgaggtgttgaactttgccattagcaaaaagtatttttagaaaaatccattgactgtttatgaagcactgattttgccatatttcgggtctctgctttttccactgcatctgcacacagtagttatatttgttttttcaattatttcttctatttccactaataatgactttgtaaaacagttattcaaaaggatggttggctttgtttaacaattggataggtgggctgtgaaaaatattctattgtgataaaggaagtagatttgttgttgttttaaatattatcatagggtctttctcctacagatttttttttattttagcaaaagccaatgtttaacttagtggcaaaggttacgaagctattagttaaggctctttgctcctcttcctgcagtccatgccatgaaagtctgaatatactttcacagtaatcaccctccagtgactgattttcaaaagccaagtgtggcaaattatagtaagtcactctgagtcgctgtattgcctcttgccttgtgaaaatcagatgtttgggggtatccatgtatgtgaccacaagcatcagtttgatgtttgtgatttttaaaaaagtgtgtgtgtgtgtgtgtgtgtgtgcgtgtgtggtggtgtcagagagatgtttcatagaaaaagtaatttaagtgacattctcatttggcagtatttaattgcttccttcctaatgtgtacatagcaatctggctgattattggttgttacttgttcagaatttattgtgtcttattgctatgtatgcaactgagtgtatgttaaagtttagacttcagtacgctatctgcacaattttgtgtgctttaaacctctgtaaacatgcagatgaatcatgtatggtgtgttaaatgtgacttccactcttgaaacaataatttttttgtatgtacatttgaaaactatttgaacaatctaaatgtgtactgtaaatgtccagtaccctcaatcaaaaacagcactggtaaaatgtatgcctcttcaacctaccaatttataagaggtcagggataaatgagaattaagttaatttttctaatggcaagtatttttggtaatttcttacctgcctaagtgtattttcaagaaaaattgtcgacagaagaaatctaagctatcagagggaatgactttatttcataagcattaattatactttatgtcttacctaatattgttgatatctaagtcaagcatgaagtcaaaaaatattttttattcttcattagattttttgctgtttaagggacagtttccaagcccatttgtcttaagtgtggaaaaatgttgattcaataataaacaaatagaattcttaatacttggcttacttaatgctttttcatgtcatgaaaaagacacaaatttttcatcctgagcttttaaaatctcctcactgaaactttggaagaattatcatttgtggcattgctttggcaattatcagcaaagtctgaccagctggctcttgattaatctgtaccattcaagttatttctctttcataattggttattgccaagaattgaaaatacagcagcaggttgccacagcaaatactctcaccaagttgcacccaggagcttggccatgataatctcgcgtcttcctccactgcatgcacgtttaaatgtctttggtgcattgctgcatgcgctatcccatctcaatttctccatcccttctgtttccacacccatgaagctccttctacccccactcccgctggctgagatctgagatttcttctgtgtttgagaacactacaaagagattgcttccaccctaggaacctgtacaaagtttcccctgaattcccaagggtgggaaatgtgctgctttggaccacatttgtcttatgctgttttacagaattcttttacacacagacgaattcaactctttattggcatgtttgtggtcggctttcttgacagtctcagagggctgttttgttgtcctggccaaatatgctgttttccctctgtaaattgtcatctttctaagcaaaccattactttattttcctaattctttctctaaataaaagtttaccttctttttcaaaccaaacagatgacattcttctctagtatcccctgtcttctatgagcactcttggggtggtattggagtagggacagaatgaggtaaagagtaagaggagccttttcaaatgtaacctgctaagtaagaagtatgccttcagtgaatgcctaaccctttcgataagttatgccaagcaatatgcagtatttccgtttgccaacaagaaatcactccttcttctctataataaaaacaaatcattttagggaagtaagcaagtttaaaccaacagtttcttatcaatttaaagtgactcctagacaggagaaaaacattcataagaaaattatcttacctgatattatcataatatcaagcaagttagatctttgcaatgattttttgactatgcaaatgcatttcctcttcaggtagcatgtggcattcccgtctttacatgatgctccttctagtggcctgtcctgtcaaacgttgcattaagatattttgccaaagaaaatactagtgttagatactgactacaggaattcaggtaccagttccatactagactagatccgatgctctaagagaaaaacaactggctgctttgttacccgtcaccccaccccagcacattttatagcacctgacataaatatctgttaaatgggtaataaaccgatgaccaccagaaattgtagagcgcgcacttaaaatcaggttaaatcccataccttgcttaatttctccataaagaatggacattaagactttttcacatgcctaccagcctgcaactctctaaagtggctcagatgaagctcaatttgtcccctcagggtaccttgaaagtatttctctatgatttcctgaaaacttgcaccacttaccccacacatcacctccagagaaccttgattgggtgggaatgtaccgtccaatctggagctggcccacctgatggaagccaagggtctgaggagaaacctgccctttcttgtggtgcaagatgcacctccagatggccagcagttttcagagtgtcatgatatcttgcccagtgattgggtaccactgaattgacatgcagatcactcagctcagccacacccactgaatacccagaaaacctgcaaaagtctcgtcctcgtgcccagtatggctgcttttgcacacaccattttcctcatccagctttaataactgcaattttctatatgtttagaaaacacttttcacaagcaccatcctttctgagcctaacaaatagccctgtgagattatcaggacaagaacgtatatctctgctttacaaataaaaagagtgaggctcagtagagtgaaaactagggcccaggactcctcactttccagagtgccacgtgccattgagttaggtcctttgagaaaaaaaaaaaaaaaaaaaaattaaaaaggccactggaagctgtctctgtggaagacaccctgaacagccagacatgcgagcgacatttacacagacacagataacgatggcaaatgaagccaaacaagacaacaaagcacacaaaccctttcccccaaggcaaagtcaggcactctgtgactgcaatcaagacactttttcttgcagtcacagagggcctgactctgagctagaacctgggcctcatgggaaagagttgtgtgtttttcctctctgaacttacagataaaggcgtttataaaatgtgtaagctctatttcagctttgaaattccatgaatttacactcacattgattacctatcagagataagcagggattctcagaatgtttctattttcgggatgcgttttgtgttattgttgttttttgggggtgcataggttgtgggagctacgtagatgacattgaatctattatagagaaagaaactgtgggaagtccatgctcagtgtccccagtattcccctgccctgcaagaaatctttcatcgcagaaagatttagatcaggcttctgcctcacctgacccccgtctctctcagaaaacaatttcacctatttcagttcccctctccttgctgtccaagtcactgggatcacagtggttatggtctggaatatcccttggaccttccccagcatctaatctgacaccagcaccgcccaccagctgttctcttagattttgcctgatcgctgctgtaagatcacttccctggagtgtcccagaaagggtcaaggcattgcacaactccagggggcactattattaagtgtggaatgtgctctattagccacttcccagaacccaggcatgaagcaagctggccctttgccagacagcaagcctgaattgggcatctcctttggggtcaaggggaagatgagagcctggtatagaacaaggcaccgggccccactttatgaaggatgtttatcagcccacagtgggtctgtttagcagctcagtgttggacacacatctgactcttccaagtttgggccaacttgagcaccagcttggactttgcttgggccattttggcttggctagatccaagtgtcaggcattgttctccctctgccctcagcagagtctgtgaagtcaggacatcatcattctctgacaaacattcagtacatttccctgggtcccaggaggcctgatattgaaatgttttcctctccatagttatattttccttggttgaaagagttttgttttggaagttgctaccctgtcgaggtaatgagtcagtttgggaggccggtgcagaggggaaaatgcacatcattggcagaggccagaaggatgggggtgagggaagatgggagattcccagtgggggagaaagaccacaccctcttcccccttccacccttttaggaagaacatagcccctccttaccagctgagggcttcctcacggggaccaggagccaggcccaactgctgccttaggacttgatcctgggagaaataggcaagcagaaaaggagctaacatttatgggtcatcttttgagtaccatttaatcttctaccttatactttttgtgaaaagcaacagcattatcatccacattttacagactgagaaactgaggctcaaaggaagcaaaactgcatgcccagcatcacacaaccagcaactggcagagccaagcctggaattcaagtttaatataggagtccaatgcccattctactacgtggtctctctgcaggattcaggcctacgcagaaaagcagacccaagaaacttggggataagaagaccccgttgagggacagctgaaattatctgactcctggcagggaaagcactgttggcagagggagaagaggaggtttatggacttaggccaccctttttctttgcctctaattgctcctctcctcaacttttccatccatacattttcttcacatggagagaaaagtcatagagatacaaaaaacacacgtaaacgcacaaacacacgcagatctctcactcacacacaacacaagtacgcacgtccatacaagcacagaggcacacacatctggaggtaaatctcaggattcaagggttggcctcatgccagccctgagccccgagtagcccactgaggagccctggtctgcctcactttgggaggtcaaatcaatgaaagagccctggtagttgaaaaaagagaaagggagaaagaaagaacaccagcacctctcatgatgggaggtcagagcgaatgaaaccaggagaagggggtggggggcagggtgagagcaggggggtggggagcctggggctggcagctgaattcctaccctggcccagctccaaaagattaaaatagagctcttagagtgtcccctccacagaccagcctgccaggggccagacaatacgtgggtttgtgctccagcacaggcctccagagaggtgatgtttttacccggacggcgaaaggcacagaggcaggtctaagccattccaagcctccttcggctggcagtcccagaacaggccacagcacagggagagctgccggctgctagggcgcacacagatttacccttttctcttctcaccctggggcaggccactggactcctacttcttcattttatctaccctgaaacacccaactggcagggctatgtgggacaaggtcttagcagattccttatactctaattgcgaaagaaaaaaaaaaaagcatgcctgtaaacagccagccctacccatgagggatggacaaggcgtccctcgggattatctgaaatactcagatgagtacaaacacttcattttctcaaccaaggaacacggcttccccagaaggaagccctgctggccacttgaggttacatcttggaattcttgagggtttcaggtggctaggtaggtctcaagtccaacatctctgaccagtatatcagctaaacacacaggctctggagtttgccagacgggggttctactcctgactctgtcccttaagagcattttgaacatgggcaggttacttaacctttctgggacttaggttctttgtctctgacagcacctacttatggtcttaagggctaaatgatcaaaatgtatggaaagtgatcaaaccaatgcctggtgtgtcactggcaaatgttagccagaaagaaagattgttccatcctgccaggtcccttataaagggggagaaaataaaatttatcaatcagacttttgatagtgagaatgggtgctacctgggcagaatcctgggacactggcttaccagggactacctgggaaaactgggacataggatccccttcttttatagcctttcaaaaagttcctatttaacactccatcaaggtaatctcttctaaaatggccctaaagtttactctattgcataaagcccattaaaagccacagtcttttatagtatgccatatctatatataaaattcttatttaacatataatcatatgttataatataatatggtaaatgatattatgaatacaggacttaaaattgagaaaattctgtcatcttaattttttctgttaattggaaaaaaatagctgttattccattttaatggaaaagccccttctttcatctcacagaacattaatattctacaaaagcaaaattaaagaatcaagaatagtccctagggaagtgagagatggaggacaactctcatgatcatgacatattttctttaaacagttttaattattcacgtatgaagatcaagacataagatgcccaactgtccaatgtgcctagcattgaggacattggactttcagttttaaaaccagaatggtcctgggcacaccaaggaactggttgcctcaatgaaagaagaaaacacctgaaaagtatacaaggattccttagcacgaaaccagcaaacagcctcaatctatcagcaatcatctttagacccattaccaaaaccagacagctccccaaaagaaagtaatcctggtcagccaggtgatttaagaactttcaaatgcggaaaatgcttgaacagcattttgtgtgtgactgttttgaaatacactcttactcttaagcctctggttccttccactcaacctggccatcccctctgtggtccctggatgcctctggaatgtgccttcctgggtctctggaagacccctccaacataaggtcttggtgacctttttctaattttatgtttttgtttgtctgtttgcttgctggctggcttgtttaaaaagaatagcaccttcctctggagtgttttgctagcattaagtaaatttaaaacacatgggaaaggccgtatggtttacaatgtaatcttgctcttcattctcactacgtataaggtgggcagtgtcattgtgcccattttttttaatgaagataccaactctaagagaatatagccagtaggaataaaaaaaaacagaaaattcagatgcaggtcttctgactttaaatcctataccatgcctcaatattaaaacccgtttattttatttaacatggagtgatatttagatatggttagtccttgcatttcagctgagtcatttaaaacacacacaaacacacacatatacacacactcaccaacacatatagaccaatctcaaaactgcatccaaataaactaacccacctcactccccgacccaaacagtgaacagatgcattttcctggattttacttcagacaaatagtcactttgaaaagtaaaacgctgcatatacaccatgtaatactatgcagccataaaaaatgatgagttcgtgtcctttgtagggacatggatgaagctggaaaccatcattctcagcaaactatcacaaggacaaaaaaccaaacatcgcatgttctcactcataggtgggaattgaacaatgagaacacttggacataggaaggggaacatcacacactggggcctgttgtggggtggtggagaagggagggatagcattaggagagatacctaatgtaaatgacgagttaatgggtgcagcacaccaatatagcacatgtatacatatgtaacaaacctgcgcgttgtgcacatgtaccctagaacttaaagtataataataataataataatagaaaaagaaaatgctgcataacaaaataaaataatgacttagcaaattaaaagaggagggagagggcgggcgcggtagcttatgcctgtaatcccagcactttgggaggccaaggcaggcggatcacgaggtcaggagatcaagaccatcctggctaacatggtgaaactctgtctctactaaacatacaaaaaattagccttgcgtgttggtgggcacctgtagtcccagctacttgggaggctgaggcaggagaatggcgtgaacccaggaggtggagcttgcagtgagccgagatcccaccactgcactccagcctgggtgacagaatgagactccatctcaaaaaaaaacaaaaaagagaagagagagaagacagtacgttgtttatcacaccattgactagcataaaagaatgtaaaacttgctaccaggtaaaaccaatacattaggaaatgtatccaatagagagaaaatcagtagtagataaagaaatttgtacaacatgcttattgcaaagttgctgggcgtgacacaactacctggagacaacctgagtgcccacaaatagcgaaacaattggacaaattctgctgcatctttagtattgttatgaagaacgggtaaaagccatttacattgacatagaaagatctctatgatgggttggaagaaggtaaggaaggaaagtgggagaataaaatgtatttttgtaatccagcctgctataagcattgttttaagttctattatatgcatatgtatgtttatatatatatatatatatatatgtgtgtgtgtgtgtgtgtgtgtatgtgtgtgtatatatataaacatacacagaaataaatatgaaaagaaatataagttgttaacttcagagtttgagctaggaaaaggaagggagaaattagtaacatttttatatgattctgaattatttgactttttatttttaaaagcatatattatttctgtaatttaaaacaataataaagtaagtcaaaaagaaaataaactaagcccagaattttgccatgtctaatttgaacaaagaaaactcagattcctcccttacatctttgggttcatccaaatgaactctcttaattggccccagacactgacatctgtgtgagactcatcccctctttactctctatattggtttctaaaatggccacttctgctggatgttaagattttggttgtgaactatcctcccactcccacttttccctccacacactcacccccaaaaagactttggttcctgctaaaaaggccaagaataaatcctctccaccccaattattctaccaatacatcattttccctactcttttctccctaacctccagatgttggactctggaaatggataactgtgggaggcagtggaatctccctctccaaaggactttactgagggagcgagtcacatctgttgaggatggcttggatttaagtgcagttagaacaagttagttatgggtggtttgtcatttttggagtgctgattgcatacagagcccagtgacagagaggggcaggaaatcaggagccctggtggcagagcagacctgcacagaagaaataaattggttgcctgatgaagcaatatttgatcaatgacttgtatggacaactcctagattacacttttagaccatataaatctgagagatagcttatgctagatgatagactattattcaaaatggtcttgaccagcagatttcatttaatagagattaaagataatttctgtatttggttaatctaagaacaagatgagagaattttagctgggcaaaggattggggggataaaaagaattaattcaggtgttttagttaacaagctcgaattaatcacagtataaaaagctgctttttaaaaaagtccactagtgcaatctctagatattttaacagaaatagatccattcatatagtcattcttttgttcattctttcaatagcaaacattaactgaatacctattacatgcctggcactgtgcttagaatgtgttaatgagctctaagagttacatagtactctttattcatagtttgagtcttatgttcaatccgggataccatgttttatcttcattgtcacactatacaaggataatagatatataccaagtcaggcacagaatagtcaaagaaattgaagctgtctagccagaggtgttaaggtatgataactgcagtgaaatatctgaaggattactgtgacaattgttaagtagatttactttatgtagcatcatttaggagaattgaccgtgatagtttaaaaacatgtttagaaattctgtgatacccttcaaaagatggagcctaattccccttcccttgaatgcgggttagacttagtgacacgcttctattgactaaaaatgtggcagaaatgattatgtgtgacttccaagactaggtcatagaaggcatcgtggattcctccatgctctttctctgggggaagccagctgccatgtcctagggatactcaagcagccctatggagaggctcacctggtaaggaactgaggtctcctgccaacagccatatgagcaaaccattttggaagcaattgtccagcttccagtcaagccttgtttgacaacagtcttaaccaacaggttgacttcaacatcatgagctattcttatccaaaaccgaccagctaagctgctcctgaattcctgaaccacagaaactgtgtgagataataaatgtttgttgtttttaagctgctaaatttgtaggttaatttgttattcagcgatagataagcaatacagtgaccaaaagattcatctgagaaggaaaccaatttaaccttaacagaaaaaataattgcaaatgaaaacttttgtctaagagtggaatggtaccactcacagctgaagcagtgagatccctatgttcaaccagaagcaggaccaccaattctcaggatactgtgaaggtgatatctacactgggtgcatgagcatgagcttagaacccaaattctttatttttcatctcattcttcatattccaaccagccaccattgatttcctaaccttcaatcttctctctggttaagaaagtaaggtcaccttcatagcaatgcaaagcaaccctggcatgattttcctctggatcttatttggggcctgactggcttgctcccaccatggaggagccattgctttgtttttgcaatggcacctccaccatgatttagagacctaccaagttgaaattggatttaagaccttattggccctggattgcaccaagagcacagtaatctcttcaaagcccaagctgcagcagtcagcattccccctgctgctattgataatttgtaccatattgactgggttacttatcatttgcaaacaggatcccatggtgactggatgtcaaatacatggaaataactcttcatcaacctggagtctggggcccaccctccacccaccctttggccaccagaatgccgggcagcccaggctgtccttaccacccacatacccagctcattgccttgctaaaggtaaagacctcagcctcatcatgcatgcagctcctggggggagggagggatggagggaactgatggggactggggaatcccaaagagtaaacccaaggcaggtgaaacatgcccaggacctgaaggatgcaattaagcccaattcaccgggatccagagtttttctaccaaattcctgaggaaaccaaattgcataatgtgtgacttattcagaaacacacatccccgtgttgttggccaaggcagaggcaatgtggtgggggtcttaggcaaggggtgcaggtgcacagaaatgaaaacaacagactaaaacaacaagctccctggtctataaagaacagccccgtgttttgccggattcctcagtcagagcgagcatgcatatatatgtgggttcttgtgtgcatgtgcagctgggactgggggtggggagggtggggccttccagggaggaagcaagaacatgtctacacattttaagtggcaattgcaaaggaaacaatcagaggtgctctcacatacattgggcactatttactttttgccggctcctataacttctgaatctcccccttctcgtttcataaacattttgtgtatagttttaggtggcaatatttttgctcatttgggaagactgtgcctttttggagttgaatcaggctaacttgtgccttccatgtttcttcaggagtgggaaacaggagcagtgacaaatgctaaaatgtgggatggggcagaatggtttgagatgagagaatttgcagaaagccaggaggaagatgattgtttaaaaaataaaattttgtcattgtcccgccttgggtcttttccacacctttccagtggaaagcctgtttaacctgctttaaaaaaattgcagcaattggaagttatgagtaagggttgtgttgcttttctatttgacctccactcctgcaggactgaacaattcaatctctctttcccagcttacctgtggcatgtggggcctgcttgacttgaataaatggctgtttatggatgatagcatctggtatgcccctgattaggtcactgtgttatgttaagtatttctacctcctggtggagaaaccaaagctgacagttctcaagaccaccactgcccaacacagacagcacagcacccgagattggatctaccccttagaaaggccagttaagctttctgtcaacttgcagcactcctctgggactgtaggaggagagcaaaagataacagcttcaacctaataatgacaatattcatactccaatggagaacctatctgtacaggactctgaacacctcatctggtttgattctcaccaccaccctggcaaagttgctattgttgctttgatccccattctacagatgcatggattgaggcttgaataaattaagcaacttgcccagggcctcacctgaagtaaatagaaggcacggaatttgagctcaggtctttctggctcccaagtttagaactgttctaccataggttctgggaaaagcagcctggagcagtgaaaagagtcataaatactgtgcaacccagttattcaacctcaccttgcctcagtttccttggccataatatgttagaattactaccattacccttaataggactgctgtgggccagctgaaatcttagatatgacttgaaaatttactgagtacctcgtggacagtttgttgactgaaagaatagcaataaatgaatcaataaataggtaaactaacatttcttctgagtgtaagttcccaaaggaacccctatgactgttaggagagtaatctaaagactcccactgctagctcctgagttcctgaacagcaatggaagatttggatctttaagatcagagtttcctgcatgaagcaaagaactatgttttcctgaactgtaggccaatgaaactccaaaaagacatgtttttccaatgttctctcagtagctatcctaggatgtagaggaacatgtgaaaaaaaaaccaaatggattcgttttttaataaggtctgaaaggcataccaaattatttcggttctccaaggtgtctgcttccctccagctgtccagggttttcagctgggtctcagaaacgaagttcaggacacccagacaagtaattctaaccagcagtgccaggaaaatattaatgtttaaaaaaataaagcagagatttgtttattttttaaacatgtacatatcttcctataacgtccctcacacccaacagccctggacaattctgctttcacctgagcaggattaacaagttcagagccaaatctattcgtgtctcactaacccaaccttgtaagcatcacccccaacctcttttttcctcttgacgctgattttcaagccttcactcccctgtgagataaattggttctattccgaagatggtgggggcgttcggctgggatgacgccgttgtggtgagcaaagcctccggaactattgggcctgaaactctctccaaccctggcctttaaacagccagttccccagatacggcagccaaggcctgctgcctcctgccttgagaaacagcccaggggtcgcagaaggagaccccagagagccatagggttaaccaaccaaccataaacattacctcctctgttgatcttcaaaagtttggggaaagaaaacaaaccacataaatctttatcagggctccttacaactgccctgggaggtggctccaagaagaactcggtagtgactctgtacggaggataaaaaatgacttcaatgagcaaatccagtgccagaaacagattgcttttatttctattttatttttttactctccacccaccctccacccccataaaaatgacttctttttgttatttgccacccagaaactccatggcgagaatccctagtcttctattggcttcattgtttccactgtagataattcctggacaatgcaaaagaaagaggaaacgttagctcaagggctatagtgtttagaagtcaagggaagaggtgccatgtccatgttagaggctaaccagataactaacacatcttctatgaatgggatcatggagtagagtagattagatgtgggacggccactccctcctgaaaatctttcagtaatacacctttccatccaggacaaactctccaaacccttcctaaacttccaagcagacatacaaggcggtgtggcctgcacccaagagcacagaatctaaacctggcttctgaccctcactctctaggggaacttggggaagccactcaccttctgcaggccccatgccctcatcataataacagtaggtaacatttatgagccatctagtaactccagcttaacatgttgttaaatgccttgtgtacattttaaaccataactctctgaggttttatgaaacccattttacagatgaggaaactaagacttacagaggtgaagtaattcatccaaagtgacatgaaaacagggataatagcacttacctcatagagtggtgaggagtgaatgagataatgtctgtaacgtgcttagcatgattcctggcacctcgtgagctctcattcagagagttctcccgcctctggaaatcgtccctgaaccctgaccctcaacctgccccaccctcccaacctctctactgggtccctgctcccaggcccttgtcagtcaccccacctcaggagcccttcaggggcagcgatgtgtctcatttctgtagtgtcagccagtgtctggcacacagtaggggcagagtaagtgagtgttaaacaatgaatgaaacgttataagcaaatgcctaattagtagacagctaatgcaaaaaaaaaaaaaaagcaaaaataaatactaataatgaaatgacttgttctaaggatggcaaaagatccaaaatttcctggaggagcctgtatgctagtggaaaaatgtacaaaagggaacgaggaactaagtcatcctctttttttaaataccagctttcactgcagtttaagggcttcacagacttccccagaatgcccatgaatcataggaagagaacccaagagtcctgggtcccagccattctgactaactttagcaaatgtcctccaagcccatggaaggcagactggtatggaaaccacacccatatccacctgtgtgcacactcacacacacctgcacacacacacacctgcacacatacacatgcacttacacaacaccaacaaatcaatctctcagcattgactgagcacttagctggtgcagtgccccttacaaaattcagtaataagatataaaagattccaaagaccccaggacactgaccatacagaatgaacagtctagctgtggagtaggggctgggaaaatgagcaagtgtattgctatactaataatactagctatcatcttccggatatgtgccagggatacacagaatccccaaggataatgtgttgtttgaaaacggatgttcattcattcaacaagtgtttatagtgcttccaccctgtgccaagtgttgttctaagtgaagaggataaaacagtcaacaagctggacaaaggccctgccttcatggcgtttaccttctagtactagaaattttaaaacccaatgttacaaatttgtttgaaaacgggaatgaaatgtaaaacaaactacagaaagttaagcttcacacaaagcttctcatttactggggaaacacagaagatggtgattctttagaaagaagaggacaggtgcctttggcagaatctttaggaggtaggatggtggaggctggtgtgtttctcaaaaggcagaaggaattaaaagaggcctccttaaagttagggcacttacctgatgtcctccaactagtagcctagggatatttccaccagtaaaattccctctcccatcatatcctgaaccacattggcaagatatggtgggagaaagcccattggcctggaagccagacagagtgcatgtaagcccaaatagttcattaactcctataaaattgtagggtaaccactcacctccccattatgtaacaagaagcctgggtataaagctgctacttaacgattcttctccttctccttctcctcctcctccttcttcttgttcttctcctcctcctcctcctcttccttcttcttcttcctcttcttcttgtaattgctgttggcttcagacttaccccccacacaacaccatcctcgacctcacggctttagacagataagggcagcactgtttactatgggacagcgctagacactgcccacacatcatctcatttaatcctctcaacaccctcaaagggatgtatggcttgtgattcgctcaagatcccacaactggaaaatggctgagttgaagacactcagacaagtaattctaaccagcagtgccaggaaaatattaatgtttaaaaaaataaagcagagattggtttattttttaaacatatacatatcttcctgtaacgtccctcacacccaagagccctggacaagggcttcatgcacttaaccactgggccatactggctccctgggatcctgaaagcattgccttccccaaggcactgtcctagctcaagaacctctctgccagcccaggtgaccaccagctgcaccaggttcaagtgctcactctggttgaccagatctccctattagctcctgccatgccattctctctcctgtatctgtccttttcccatgtgccttccccaccctgaacatctttttttcccatgtgccttccccaccctgagcatctttttttgagccatctatctatctaaatgttaaaggtccatttcttccccataactttcttcagcttctctgtcccgcacggatctaaatcttctctgaaatgtctagttcacacttagagtcagcattgccttgtctaacacttacctgttctcaactcaacaagcatttatttattgagcccctgctctatgccaggtgcagtattcagacctgtagagaacactgaaatggaaagatcctcaaggtttctgcaatctctaaggggacgacaagatgtgcatgcaaatgactgtactttatccaagacagcatagtgtcaggtccatgagaaagatccatgcagttttagagatgtttgttcagtgtccttggctaggtgtgtggaggtatgcacatatagtgtgtgcaaactcacttccatctcccaccaaatgaggcagcataagaagggggtgaagggaacgggttctagaaccagaatgctggggctcaaatcatcaactgtgtgactttggataagttactgaaccttgcctcagtttcctcatttgcgaaaatgaggataaaaatagcacatctctcacaaggtggctgcgaagagtaaatgagtttatatatgtgaagtcaccacctagtttcatgcctggtacatgaaaagtactcagtaaatgtctgcttttatcaatattaacattattattatccaggccaaaggaagttcctctgctccgccattttttgtttgtttgatattttgtgcaaagtcctatcaacatgccatttttagactgtatcattggaccttttctgcagtcctaacagaattctcccgctgctagttgaagggggaggtggggggcgggtttcactgattttattatatggtagttgttgctttcctcctttccaacattttaacagattgctcttgttttccctgtctttggagggaaaatggggaacacaattttccaaatgaaatcaatgcataaagcaaagagctcggctcctccttcctgcagacatagccctgccagctgctaggcatccctccttcatgcaggcagcccctccagtttatacttcccagtgggacagtaattttcagttcaggccaaaaggctttgtttaaatgtgacacttatgtggtaatagagcgtattgcaggggtctttttttctgagggtcaatgttgaatttactctcaaaataaacaactctatccttttccatcatctcaaagttgtgggtgggattgaaaaaggtggaagagactacagcatgaagaaaacggaaggaaaagaaaaagacagggaaggctccaaggaagtttagaaaagaaggagaagaataggaaccagtgtcctccacaaatgaagcaaatctacctcctatcttcctgaatgatttcacaaataacaacagcagatatttactgcaaatctgctgtgtgccaaacagtacactaaatgtgttactgacatggtctcatttaattaattagattttttaagagatggaatctcgctatgttgcccaggctggacttgaactcctgggctcaaaccattctcccacctcagcctcccaagtagccaggactacaggctcacaccaccacacccagctttatttattttcatctgaatccccctgcagtatatgtgattatgaccattttgcagatgaggacactgagaatcagagaggtgatataacctgccctaaattgcatagctagcaagtttgtccagctgaggtgagaacccaagtctctctggctctgctgaatgtgtgctgtctactgttccttggggcagcatttgaggactgttcagtaatggagttgatgaggggaaaatcatgggatcgtatgttctaaactaagaatcgatatagagctggacacacgttataacaaagccgtgtaacatttgatattgagtctgcctagaatatataaaataaatggttgccctacaagagggtaaggctgaggtagaaagcaacaggacaagcaagggatgaatggaacttgggaatgcatttccaagtggagagggagaggagagattgggtgctggggagagacaggagctaatggttaccctgtaacagtgagtctagaactcatgagatgctacaccgagaagccaaaggaagccttgaatcttgctgtatgccaggcaaaggaaagagtgtgtcacagaagccttgtagctgtagattgtcacagtcaccacccaggtgtctccaagcaatactgtgggactcttagcacagagcagtctgtggattttccagcactcctcgaagaaattgtttcaagggcttaagttttctttccagaaacctagcttaaaaccaattctctgccagacgtgctctccaggaattcttgactgtgaatatccttctcacccagttaatttatggcataagcacccccatcttgaaacagattgaattaggcaaaattagaagtctggatcatctcttgagcctacctccagggacaagaagaatgatgaagacatggagattccagataaaattggacaaaatgaacacaattattcctcaactggaattttggaaggacttaaaaaccagttctaggccaggggcagtggctcatgcctgtaatcccagcattttgggaggctgaaatgggagtattccttgagcccaggagttcaagaccagcctgggcaacatagtgagattcattcctataaaaaatttaaaaagcttagccaggtgtgtgatgcatacttgtagtcccaactactcaagaggctgaagtgggaggataacttgagcccaggaggtcaagactggaatcatctgtgatctctcctctgcactccagcctgggcaacacagtgagaccctgtctctaaagaaacaaacaaatggaaaaacaacaacaacaacaacaacaacaaaaaaaaacagtcctttgtcacttcaacccattgacgtgcttggggcttgttgatgtattattcatgttctttctcatcccatggacgtaatgaaataagaaatagatatcagttcacaagaataatgactgatgatttggtatatgggatgcacagaccaaagactcaaaagtcaactcttattaaagcactgtaatccacattaatatgacagaccagaataactctgagcaagccattatggtccattatgaaaataacgttcatttgcaaaatgaggaacataccaaaatgaaagttgttccagttctttcagctaaattacacattaagcatgcagacttcctcttccaacattttgaaatggtttaatgtgcactcaggctggccaagccatggattttctaagactgccacaaaggtgaagcctagaaaaatgagggctgattgccagagagacattcagccctcctggggtgttgatcaggtggtcatgactgtgctttggaacttcaccttgggggataagattgacaccaacaggcagctgtgaatcccagctggcttcatgcaagagcttattggctgcccacctccagtagttggttgttagaacttggggatgaagtgtagtggacatttgttgttcttgcctttcgagcattcattcgtaccgtcttctggtaacagccccctgaatttcctttggaaaccatctcttcactattctcagtccatgcagtaatagctaagaatggtaactaacatacattaagctctaaccacatggcaggcactgatctgagcattttgcataattaactcatttaatcctcataccaactctttggtacaggtactattattattcccatttgagagatgtctcagataacttacaaataaatatgtaatttgctcttaaatggcagaactgagatttacaaatccaggtagactgcatgcagtgcctgtgatcctaaccactagtagttgcagtagggctgaactctaacacaacttcaggctcatgaactaggtctggccaattcaagcatcatatattacccaaagtaagccaatcttgtccaatgcaaacccaaggttttatgctggaacaaccaaacgtagtttcttgtttgtttgtgtcttctgagcctggacctgagacaggaagtcttgaatgtctgggaaccaccatttagagagaacctaagaataatgccaatgcagataagatcaaagctgagaagatattggtaacaatacccaagcacctgaaattattacacttccgggacttttctgatatatgagccagtcaattctctttttactgaagctagtttgacttgggttttctgatatttgcaacataaataatacagaattcaacgtgttagtctaagaataatactttccatttatgtactactgtacaattgccaaagcttttcatttaattacttcaatattgcatttatttattcatcaatttattcaacaaataaatatttacagtttatctaattacagtcactgacataagtcaaggtgatcccctccccgttcctctcttagctatagttggttcccataattatgtgcccatcattcttgcagcacttacctctaattactctacatggatatctataacttagcaaaacataggcttctctggctgggtgggcacagtggctcacgcctataatcccagcactttgggaggccaaggatcacttgaggtcaggagttccagaccagcctggccataacatggtgaaaccccatctctgctaaaactacaaaactttgccaggctttgtggcttttgcctgtaatcccagttactcaggaggatgaggcaggagaattgcttgaaccaggaggtggaggttgcagtgagccaatatcataccactgcactccagcctgggcaacagagcaagactccatctaaaaaaaaaagaaataggcatctctgaattagaagtttatttatcctggaatctctgatatccaccttggcccctgacactcattcatattcatttctttaggaatacttacatgctgggtactatgtgactagtcaacatcaccagttagacacaacagaaagcaactctggctaacttaaacataaatgaaattctgaagggatatcaagtagcccagaggatcaccagcaaggttggagaaccaacttgtaaaatggataggcaggaactaaaggaatttgggcagccatagcacagccaaggttatacctcagatgagtcagttagggcattgaggctgacactactggacaccagacgctgctaccagggccaccgaaaagaatcctcagccctccctgcttctctgcatcactgattccagattctaagacccaggcaggagcatctgactggctgagctctggggacacgctgtgccctatctgtcagatattctctgacacataaagactttccatctttcttattggaaggcaaatccctgcctctcctgaaacttacaccaaaaaaggctccccaaatatttcttatgtggccatgaagtgacaattgtcaatgatgagccaaaacaaagccccaaaataaaagcaaaatacatggtcaacatggtctttgccctcatacagcttatagattagtaagaaaagaatccatagagaatcattaattaaataattaggcaagaaacagtcacagctgtgatgagtacaacgaaggagaggaatgatgtaccccaaggaatataatactgcaaatgtgtttcaggtatccgttgctgtgtaacaaacaatcccgaaactagtagtttaagacaaacatgtatttttgtctctcatggctctatggactgactgggctcaactgggtggttctgacttggcctctgtcatgcagttgcagtcagatagcagctggaggtggaggcacatgaaagttcagcatcatggtcagttgacattggctgtcggctggaactcaagcggggccttttgactacagcacctacccatggcctctccatgtaacatgggcttctcagaacatggtggctggattcctagaaggggaggtgtcccaagagcaagcactctaagagaaccaagtggaagatgcaagacttctcatgactgtctcagaaactgcacagtgttacatctgccacattctattggcaaaaaaaaaaaaaagaaggtcagagtagactcaaggaaggggaaccacaaaagtacatgaatgctggaatgtatggttcattggggatcatctttggaaattaactcccacaaaaattttgaaatagaggaaatgatctagtttgggggggtcaaggaaagtttccaagaaagtgccattgctctgagatataagagttgagttgaaattaatgagataaaaacaagaagtatgttccaggcagagggaacagtatgtgcaaagtccctgtggcagtgagcagcaggacacattcaagaatataaagagagtagagctgatgaacagagactaaggcaggatgcgagacaagataaaacaggagaggctgggcatagtggctcatgcctgtaatcccagcactttgggaggccaaagtgggcagatcacctgaggtcaggagttcaagaccagcctggccaacatggtgaaaccccatctctactaaaaatacaaaaatcagctgagtgtggtagtgggtgcctgtaatcccagctactcgggaggctgaggcaggagactaacttgaacccaggaagcagaggttgcagtgagccaagatcacaccactgcactccagcctgaatgacaaagtgagactctgtctaaaaaaataaaaaataaaaataaaacaggagagtttgagtagaaattcattctggaaacccttctataggctatgctaaatattttgttctttacctgaaaagcaatgagaatatttttaagtggccctcagaaaatattcatagattaaatgaacgagtgaatggcttcaatcattctatggatacatactgaacattgactatgggtcaggaaaaataagcgctatgaataaaatcaacctgatagaagtggctggaggcagaggatgatacaaaagcatgaggcatggcaaaatctgaggaatgagcattcccagtagaacacagcaaatgcaaaggccctgtggtggaagtcagcttggtgtgctccaagagcagaacagaagaccatcgtggctggagtactactgtccttgtagggaagaattcaaagccagctttctataaatggcaggggcaccagcaatgctttcatatcaggacagcacaccaccaggactgcggcttcggtgactctggaatgtctcttcctgctagaatgtttggaatgctctttctctctggcctggctctgcctgtcctcggctatgagacttatctttcatcatgtacttccaaagctcaacaacccccaaggaagcaatttggcagaacgttcaaagaaccttaaagatgttcatgccctttgatccagtgattccccatctagggatctagccaaaagaaataatcataaatatggaagaagattatcccagcatgatttataataatgaaaaagtgctagtaaatcaaatattcaaccataggggaaagattaagtaaattaatgtgcatcttctagatgtgggcattaaaaactatgtggctgaaagactaaaataacaggaaaggcttgtgttataatagtaagattaaaaagaggatataaaatagtatatatacgatttcttcaactatttaaaaaattatatgcaggaaacaatgctgacagtaatcatttatttaaggtgaaattacaggttatttatttttccttcttttctataatccttctacttcccataatgaggattattacttttagaataaaaaataaattttattctttttaaggaaaaagaaaaaagaaacagcaatggcttcccactgcctttaggatcatatctaaacatctaagcaggcagtcaaggacttcacaatctggcaatgaattatattttctactttaaaaaattagatttgtttcttgtctcccaagatttttttcctttaccagaatttgatgtttcagctaacacatgtttcatctgcttccccagaagacaatttttttgacaatagacatttaagcatgctatcttcttcctacctggggttcaaggaagggagggagggagggaggaagacctatcaacctccacctgctctcatctaaatcctacccatgtcaactggtgcagtggttcacgcctatactcccagcactttgggaggccgaagcaggaggatcacttgagcccaggagttcaagaccagcctgggcaacatagcaagactttctatctacaaaaaaaaaaatgttaaaaattagccagacatggtggtgcaatcctgtggttccagctactcaggtgggaggatcacttgagcccaggaggtagaggcttcagtgagccgtgaccattccactgcactctagctgggtgacagagtaagatcctgtctcaaaaaaataagaaataataacaataaatcaatcctacctatctctccacctcaagtcattcattcctcacaatgcctttcctggtcatggtggccatctctgatctcccttttctaaccatcgatattcattatcatcacatctggctctacactcacatatggggctaaacacgcctggccttacagtgctcctcaggctcaaggtcttgtcttatgccccatataactaatcattcctgatatgattttattgccttccaggatcatcccatcttgacccctaacacagtccatcttgttaatctcataacggtaaatgaatgttttattagtgaataaaagagtaactgtatctgaacaagtctctaagacaaaacagcatctttgggaaatttcattctacgtctagctgaggcccagctcatgatggggctgtcttttctgtgcagacaaatttccctccctccactccaacctctcacaccctctcatccccacccacccaccaccacttaccatctccagctcacaaggatttcaaatcagggctggcaatgtcagagggagattgacacataaactccacacacaatcagcctactcaagaaaggacgcttttgttttcttccccatgggcccccataaattataagttacagcctttctttattaagtgagcctaagtttagggtagagaaatcatcgctcaccccgcagaagtgctttctttctttcttttttttttttttctgagacacagtctctctctgtcgcccaggctggagtgtagtggtgtgatctcagctcactgcaacttccacctcccgagttcaagtgattctcctgcctcagcctcctgagtagctgggattacaggtgcacctcatcacatgcccggctaattttatatttttagtagagatggggtttcaccatgttggccaggagggtcttgaactactgacctcagatgatccacctgcctcaacctcccaaagtgctgggattacaggcgtgagccactgtgcctgacccagaagtgctttctgtggaagcagatttgccctagttttgagcacatccatgccataaagcatgtgtctctgttttaataagctattcatcatctccctgcaaaaatactgaggtgtccagccccactttgtgctctcacagcacacacctctaagtgcctttctctgttggctaagttactgctttgcctcactctgtgagctcattagagggccaagctgtatcttactgtctttgtttactcagcaccaagaacagtgcccggcacatagtggccctgagttttgtgcttcgagagggagtgaatgaatgaattataaaggcctgtgaaagctcagaaagagctggcttccaactatggatttccataataaaattacttgctaatgccctgtattcgtttactagagctaatgcaacaaattgccacaaacttggtggcttaaaacaacagaaatttattttcacacagtactggaggtcagaagtctaaaatcaagggattagcaggacctgccaaaagctctagaagagaatccttccttgcctgttccagcttctagtggcttcaggcatccttggcatctggctgcataactccaatcactgtcttcatcttcacatggtctttttcttttctctctgtgtctcttctctgtgtgtcttttatgagaacacttgtcattggatttaggaccacctagataatccagaattatctcatcttgagatctttaacttaattacatatgtaaaggccttgtttccaaatgaggacacattcacagattccagggattaagatgtatatacgtctttgcggtaggggggaggtttaccatacaatccaataagtgcacttattatggtaaagatatattttattctcactgtaacagctagcatacagtcaatttttttttttttttttgagatggagtctcgctctgttgcccaggctggagtgcagcggcgccatctcggctcactgcaagctccgcctcccaggttcacaccactctcctgcctcagcctcccgagtagctgggactacaggtgtccaccatcacgcccggctaattttttgtatttttagtagagacggggtttcaccatgttagccaggatggtctcgatctcctgacctcgtgatccatccgcctcggcctcccaaagtgctggggagtcaattttttaaatgggttggatggatggatgaatggatggacgggtgttctgtcactacccataacccctaacacacttagttagtgcctgctaacaaaatgtggctgagaacaatttttcccaagtgccaatgctatcttttctcccacgaccacttaagattgatactcctgggatcacatccacattatccctccataatatctctactaatgtaaaacactgaagcagccatttgaagaaaggctagagtgttttacacaaatgtcttggggtagtaactacaccaagcgtttgttgaattgattcaaatcagcttaactcaattccagaaacattgactatgcacctgaattttgcccacagaacttgcctgaataaattgtttcctctcctgggcaaacaacctagatcagcaaccctgagctgtcatctcataaatcctaaattttacttaaagccagccctatagcatggtacaaagttcatgtcttccttcacaattttgattagcctctcagcttaacaggtggacaaacaatagcaaaggcaaaatcaaacctcatttgagttgttgacccagagcaagagaggtgattttcagagagtggagaagggcagaaggaatgctatgccactcttgacaaatggcaccaatttggagccgactttccaacggggaacacttgtgtagaacccaaggacccaggtaccaacagagcttgtgtgtcacttgtaaatgtgcgaggaatgggcatttcaagctcagtctgacacaccctgtgaatgcagctattttggcagcatcaatcccagtgtctatggaggacagaacaaactcaaattaaccctagttacttccttgagctctgctctctgagaaggagtcagccaggcagacagctgccactgcaaattccactccctgggaacaatgtactttatttttggaaagagggaaaagcaaaggagaagagagcaatgccgacaaatatacatttgcttttctatttatgcaaagcccctatcccttcatcacctcagttaccagttgtttagagcaaccttagaatatagacttgtaaattgtcactggcctgcatccctgcagagagtaacacaagtcagcttccaggatggcacatcccattgctgtaaagagctgtaaagagctacaaataaaaggattatttccatgacaggctgttggcctggatggttataattaatgctcctatacaataaacactctctctggatcctttctatgtaagagtcactctctatagtaatagtatcctgattatgggctcttcatcatacaagaaaaaaaggtgaagaaagcaaaactgcccctcctcgccattattttcctaccattttctacatctctatagttactacttcccatgtaatttcaaacatcattttaatcatgctttctaaaatataaccctacatgaaaagcccactggtggacacaaggaaagaagaaaggaagggcgagaggaagggaagggaaggaggcaggagggaggaagggaaggaagagagggagggaaagaggaaggggggaaggggaggagggtggggggaggggaggagggtgggggaggggagcagggtggggaggagggagagaggaagaagtcaaagacaaagaaaaaattttaaaacagctctacagggacaaggactgtgtcctgcttgccactacattcccataacctagcaggcctagtagccctggtacataacaagaattaattatttaatgataatgggaatatatgcaaaaatgatctaataaatggagaaataggcttagttcaaaattgtctatatgacagtttccttcttccactgtttggttcagaagccattttgtcactaatttacttttagggaaaagactgaaaatgaacatttaatgaacacctactatgtaccaagtattttgactttttatctcatgtaaaaccacatgataacccaaactatttgataaatgatacacacatgctgagagaggttaagtaacttgcccatagttacactgctaataagtggagaaatgggaatttaaacacaaacctatctgactatataaccaagaaaatatgactgtgtcctgctgcttctcaggtgatcatgagggtgtgtctgcttcaatatagcatcagctcctaagatgggactgtgattcactgggtctccttgtaagtaaattttactatgacaaagccattgggatatttggagaaattattcataatgagatcttatttgttatgcataacactaagaggcagtttaaaaaaaaaaaaagatactagcgccgtttgatttactccctatgggatttctaaagaagagtcatctgagaagtcagaaccacatatgtatcgcttatttattgactatctctcttctggaatccaaaaatccaaaagaaaaggtcatatttgttttactcactattccaagcctagtacccaagaactatgccatggcactcaatttttaatgaatgaaagagatgacaatgaacgctccattgattagacttctgtatctgcagactgggactccagacagactaggatgataacatgtgaaactgtggggctttgctgaatcaaaagcatggtcttgggaaacagctgaagaaaatgaattcatactatggagaattattttctcccactcagctatatttcacattccaaccacgtgaaaggccctgaatcagatggaaagtagcatttactcaaagttcaagccatctttaggggcaacccagcctcctccaatttcccaaacaactacacatggtggctgtggtcagcagaaggctatgaaagaactttgatccacctggaaggaccagagattcaggatcctaagccaaagccaatgagctttcacacatggagataagctgaaagaacccatgctttatttggggcatggcctatggagactccaagaaacttaaaatcttttctcatttgtcaccagaaaaatgtggcccaaggtcacccagctcattagtagcagagccaagacttaaactcaggccttctgacaccttcttatccaaaattatttttactaccccagaagaaggtgtgtggtagaggccaacataacatgaagaagggagtagacagcatacagtcatcactctcatggactagatggtcactgggattctgagataagtaaaggacaaagagaggcacatacatgcattccctggattctggggaaacctgtgtgtcaggctaaaggaggcagagaagtgagtgttttgagttgtatgtaagccaggcataagtgtctctcttgaagggcaagggaagtggggtgctgaagaagaaacagtacagacctggggtcaagaatataggtgtgaaccctgggccagctgtttgctagttctatgacctgtggcaagttatttaacttctctgggtctcggttttgtaatctgttcagtcagtcgattgaaccacaatcagacttctgaacaaggttcctcagtccagcaccaattaggtggactgtcataaaagaagacctgggccaatcagattttttctgtctagtatttgaacaatagaaataccaggagagtaaagcatttagcaacagatagccagagatcatgagacagaaagaaaccagagggaccatgatgcatcacaaacaaagtgaaattatgagagtcagaaatgatgggccaggtgtggtggctcacacttgtaacccagcactttgggaggctgaggcaggcggatcacgaggtcaggagagagagaccatcctggccaacatgggggaaccccatctctactaaaaatacaaaaaattagcagggcgcaatgacacgtgcctgtaatcccaactactcgggaggctgaggcaggagaatcactggaacccgggacgtggaggttgcagtgagtggagatcacgccattgcactccaacccaggtgacagagcgagactcagtctaaaaaacaaaagaaatgatgaagttgaggccaggtgtggtggctcaagtctataatcccagcactttgggatgcggatgtgggtagatcacttgagtccaggagttagagatcagcctagacaacatggcaaaaccccgtatctactaaaaagacaaaaattagctgggtgtggtagcatgtgcccatagtcccaggtatttgggaggctgaggcaggatgatcacctgagccttgggaggtcgaggctgcaatgagccgtgatcacaccactgcactccagcctgggcaacagagtgagaccctgtctcaaaaatacaaaataaaagatgaggtcaagaacataaaggacagaggctgaggaaatcagtcagtacgaagagaagaccaagccatggggaagagatgagtcatcaaaatggtggacaaccagagtcaagatccaagaccaactcctgagaccaacattcctggaaccagccaggatccaaatgacgttgaattccacttctgtctctgtatggctcagattctgctggacttcttcatcttaccaaggccagctaaatagctttccctgagttcccatgcacatgtaaacttatgacaaacctatgagtaacttagatgaatctctgtttgcatccaaacaagtctgattaagtcaacctctttgttttatttaacatataacctggatttcctaggatcagctcaattccatgaatttgtcctaattcttgaagggcatgcattaaaactgtgaaaaaatgtgatttagttttcacacttttttatgacttttgctgtaagtaaattcacaaataagaatggcctgggtttgggcttaggtaatatggttctctgaatgatgtaccaagcagttggctaggctctgtggggtgaaaggatggggagaaagtgcatacagctagacaaatttccctccttccactcaaaaatgctttcagttgagatcactcaacagaaccctagcaaaaaaaatcataaaaagaaccaacgtaagctccataagggcagagatcatgtttgtcttatttgttatttatgaccagtacctggcaccaagcctgaacttaaacagcactccaaaaatattaactgaaggaaaaaaagaaggaagaaagaaagggagagaaggaggaaagaagagtagaagccatgaaaatttgcctctcagatctactactaccaagtgcataattgactgatggctccagctgccgagctccaaatgcagcactctgtgtacagaccacacatctcacagctgctctcagtcaaagggtaagcatggcagtgatacttgggcatatagttcctgcaaaacatgggactcttttaatatggactttggttcaaggactttcctttggcctagctgaaacttttttagaagtgcattgctgtctgagactctatgtatccaaccctctctcctctcccttcaaaggtgtcagacctgcatcatggtctaatggctcttccagtctcctctggctccctctccttttgttacttacagtaatttctcccagtaggtctaaacctgtcttggcatctgcatctcagagtacctagccaatataaggacagagggattaagagaaagatgggggttgctgagtgtggctttgtttgaaactagcccatctcaaagttcctgagcttggagttgggaggaaggttttttggttctgtccctgtggtatggctaaagaaagaatgacctgcttgatacatacacccagatataccctctgccctcatctatatgctctgtgaccagggaggctgacctttctggcctgtgtcttctgggcttttctactggctggcttcaggttgggtttggctcatggaaggcactaataggagattgtccattagggagagattgtgagcaggacatttcttcgtcacctttccctgcttcacccctgtgtatctgccaatattcacattttctcgtgactacagctcccaccaaatgattgcctttgtattgttccaggtgagatttcagcaaccgcttggtagaaaagagagttgatcgtattgttaggttaattacattaatggccaattaatggcctccctatggctatcttttgcctgtgacttcatagtcctctcctactctgtatgttgccttggctatgtgggaaaacagctccacaaaacaaaaacaaaaacaaaaacacttgcatgtttctacttctaccatgagatggtgatagcctcacaatatgactgaaagagcctgcaggaggatcataaggagagtccggttttctcaaccaaggcttcatgtaccagcctatagctagccaagtcccaagcatatgagaatgctcaaccaagaacagcagagccaccttccagacccacagctgactacagaacaaaagtgaccccaactgagaccacaaggactatttggtaaaccctcaattcatgagcgataagaaatatatattgttggctgggtgcagtggctcatgcctgtaattccaacactttgggaggccaaggagggtggatcccttgaggccaggggttcaagacccgcctggccaacatgatgaaaccccgtctctactaaaaatatgaaaattagctggtgtgtggtggaaacacgtgtaatcccaactagttgggaggctgaggcacaagaatcacttgaacccaggaggcagaagttgcagtgagccgaaatcataccactgcactccagcctgagcaacagagagggactctgccttaaaaaaaaaaaaagtaaagaactatgtattgttttaagcactgagctttggggtgactttctaccaacatcattgtggcagcaggtaaccgatacaacgtttcaattagttttcatttcagggagaaagtaaagcctgcccagccaggttggctttgtggtaaggaggaaagggaacctggttagggaggagttggcaagaagtccctgttttatgacgttaagggacaagtttccactccctcaaagaaagaccaacagcccaaagacctggtcctgataaacttcctcggcccaaaccagatctaagtcaagtattagggggcctaagaaagtcactctctagggaggagacaggagcacaactttgaggctcctgggcagagaagcactgaaggtcaggtttcaaatgaggttgttctgagaattctgtcaatgcaagagcaatacccatgggactaggcactggtaagaaaagccagagtggatacagattctaccccactggctgaggatctcagacaaacctttccacgtggtcagtaggctgaggagggggaaaagccctgtgtattagtgcattctcacactgctataaagacatacctaagacataaattaagaggtttaattggctcacaggtctacaggctgtacagaaagcatggctgggaaggcctcagtaaacttacaatcatggtggaaggtgaaggggaagcaggcacatcttcacatggcagcaggaaagagagagaatgaaggaggaagtgttactcattttaaataaccaggtcccatgagaactctatcacgagaacagcaaaggggaagtccattcccatgatttaatcgtcttccaccaggtccctcctccaacaccagcgattacaatttcacatgagatttgggtggagacacagagccaaatcatgtcaccctgggactgaaaatctctgagcagaattagatccagagaagcggctacagatcaaatccaaccataggcatggataagacaggaatgatcacacctccctgtgagttttcctggtgatgccctctctcccagagatggtaatttataatctataaatactactgggaagtatattcagagatttaaaaaaataaggctagaaaagaagttctcactaaagtcaagagggactatatatgcatctagctggaagggtaaagccacaagttaaggctctctgttgcttcaaatagcctttaaatgtggtgtcttaaacaacaccattttattatatctcatgtgtttgtgggtcaggaatttgggcagggcacagctggctggttattctgttccacatggtgtcaacaaagaattcacctgggtggatggacagaagacagcttcactctcacttctaacatctgcactgggattgccagaaggctaggctcagcctgcagtatcaggcagggtaaccaaacttcttatgcagccgcttagggatctcacggagagtgtctcaagaggttcagtccaaagcttcaaggcttcatatgatcatgcttttgaaattccagaatgtcacttccacacctgttctttctgccaagcaagtcgcttagaccagctcagattcaggaaataggaaataagattccactgctcaatgggaggaggaacgaagaatttgcagccaccttttgtctacctcaccatatcagtcaacagtcaacacaattagttttaacattccagaggatgcacacaacaatcccgaaaactgagagaaaatattaacattgcaatacatatttattttctcttaaaaatgaattaattgagctttatgttatttaatgtctaagttgtcacttgtggtcttccttggtccatatgacagaggaaacgtagcacaaacagcatgcaaggtgtattgagggttcagtggggctctcaaaatacagatgactgacagccatgcctttcctggtttgcctgatttcagtgcatttctatgtgtattgcagtttacatgtacccagttaagtagattaatgttttatattacctaattttaaccaaactcatcacaaaatcaacaaacggtttttaaaagaatttttgcaaagaaagtatggacgaaggataatactgataacacaagcacaagtgacaacaaaaaaagggaaaatgacaatcctgcttttcctacttccagtgagctctccatcaactaaattatcaaatatgataagaaaattgtccaacaaatcaaattattgagactatttgaggctgggcatggtggcttactcctgtaatatcagcactttgggaggccatagcgggcagatcacttaagaccaggagttcgagaccagcttggccaacatggcaaaacttgtctccgctaaaaatacaaaaattagtgggtgtggtgatacacacctgtagtcgcagctactccagaggctgaagcaagataattgcttgaacctgggaagcagagcttccagtgagccacgatcacactactgcactccagcctgtatgaaaaagagagactctatcacaaataaaataaaataaaatctacttgaaaaatgggtggctacaaatccacttgcatttacaattaaccttactctaaaggttgattgtgtagctgctgatgtgtatttggctagtacagttagggagacttttaaaacactatttcatttttatctgatgctttaaaatttcttgcttctgaatatattttataattgcataatttattgacacaacagcttttatttatatatattattcaccagtacatcaataaataaacaaatattgtgggtacctcatcaaaattactttaccagtgaaaggtatgatcaaaaatatttgaaaatcactgttggaaatagcagacagatagcaaaggcagtggccaaaagggcaggtgaggaaggcatagagcacatgaattgtgacctggaaatatcatttcctgatgggaacatctgaacgtctgtgagtgtccatagctcctgattggtaatgagtcatggcccccagtgcctccccagccagtcatgtgttaccataatttctgctgtagtctccttctcaactcttttcagccccaaccccagaataagctccaagccaaggattagggacggctaatctctacatcataagcatctattgcagagcccttcccacaaagatattctgtcatttacctagcccttggatgcaaatgtccattggggccacccaattcaagtcatcctcattagcactgcctaaaggggttgcttttaaatgaagctttccacaaggaagaaacgttgaaaaaccccccaaacgaagcatgaacagaaaaactatttccccatggttaaaagggatcactaaattgatacaatatctctggagggatgttggacagtatgtatcaacatgtaaactgtgcagacttttggcctgtaatctcacttctaggaatttacaccaaagagataattggacaagtgcaaaatgatgtgcagcagataaggaagattacattacatgaacatttaacaaatatgaactcaaaaatatatgacggcaacatagagaggaaaagaaatcatttaagtaggctgggcacagtggcatgtgccggtaatcccagttactcaagaggctgaggcaggaggattgcttgagcccaggggttttagacgagattgggcaacatagtgagacccaggcttaaagttttgaaaatagtaataataaaaataaataaaagggacaaagagaaatcatttaagtagtgtgtgtgtcattctgaaatacttccacccaataagcctaagtccaaggcaagcttgatgtgggggacaaagaatctcttgatctctcaaactggcctcagttcccaactgcctctcatagaataagtatctcttcctgctgcgtgtgaggctagtgtttaaagatacatgacctataacataatccctacatgcaagccaagcagaaaatcaatatgttccaacgctcgaggagacacaggataaagtgaccttctgaaaaatgctgtgctggtccccagtgtggcataacctaaggaactccactgtgtttacagagaggcttatcacagcactgctatcaaaaccgagtgaaaatttgggaaccctctaagtgtccatcagtagttcagtagggtttattgatgtgcaatacttccatttaatggaatattatgcagccattaaaaatgatagtgtagttctgtatttgttagaatgtaaagattaacacagcatgtcatcaagtaataaaaagattatgtaaatggacacacagtacgatcccatttttattaaattatagccatatatctctatgtatgaataatctatgtaaatatatccttagaaaaatgcctaggtgaagctcagcaaaatcttagtagtagaaatctctgggtaatcgtattttgagtgatttgagggtttttttctgatttaaaaaaaatcaataaactttaaaaataaacaataaagctacctttaaaactcattctatggttagttccactctcatataagcaaatggttcccaaccttctcccccactgacccttggttattgctgcctggggtttggccattcaatcatttcagaactcaccagagaggatacaaaaactatgatacacatttgccaaatttgattctatagctgtatgttcctttgtcttttctctcttttgtcttcaccaaattagtctgttggatatttttcacttcaagagggaccaaatctgttgtaacttacttagtgcaactcaggatagcaccatatctgctcctctctagcactcccacattattctcagaaataataacccatcagaaggtgcttggagtggtgagctactggtgaacatccagctacatctgcacctccatctccaggagactttgtcccttagggctcagcttaggtgctgcctccttctggaagtctctgatctcccttcactgctgagttagctgccttttcccatgttccccgggtgccaatgttccttcctagcattgtagtctaatcctagtactgtatcatatcaccgtgtgttattgttgcctgtttatttgtttgttcttccaattggactgtgaaatccttgagggcaagagatttcaccttcttcattttaatatccccagccctggcacaagcttagcacacagtgggcatttaatgtatgtatgtatgctgaacaaattaatgagaaggaatagaggtgggaccacagaccattatcatgcatgggtttcataaaatgactgttcataatttctttcccagtttctgtcttctccccctcagaaacacagttttgatttgcctgaggatgggccacaagccatgacccttatttgagatagaactctcagactaatttaggattaaagaagaaggatgaggagactatattggtccgtcaaagcgggaaatcacggatgaacctggctccaggcatgcctaggtccaggaattcaagcacaatcctcaagaccctctctcacctttttccccgttgcttggtactgatgctttttccgcatattgccttattctctcctattctgcaaataggtcatcaccaaattgtaaaaaagatggccacctgccatccccaattcatatcctcctagctctctgtcataaaaggcaccactttctccttcaaatccaaagtccctaagaaaaagaggaaaaaaggcttggtgtggtagctcacggctgtaatcatagcattttgggagaccaaggtgggaagattacttgaggccaggagttcaagaccagcctgggcaacatagcaagatcctctctctacaaaaaatttaaaaattagccaggtgtggtggcatacctgtagtctcagctactcaggaggctaaggtaggagcacggcttgagcccaagagtttgaggctgcagtgagctatcattgtaccactacactccagactggacgacagagagactatctcaaaaaaagaaaaaaagttccagggaaagattctgatgggtctgactgcagttaaatgtccattcctgacagtgaaatgcagtcctgtgattggcaggtcatgaccatgtcccacccttacactcaggagcatgagaaactgattggctgtaccaccgagtcccatgattgggaagtgggaacaatgtcttaaagcagggtatgggggttgctggacagaaaaaaataatagatgtctctccgaaacactctgggaaagtaacccatacaagaattcccattgttgcctggaaaattcagtctcaatctttggggtagggggaaaaaaaaaaatcatgtgaccgatcagtttctccttctgcctgctcataaccctcttcaaagaagattttgtttctctcttattcctgtccctaccaaaatgacgctgggtggtcaaactttcaagacccctcagaacctgcagccagactctgacaagcaaacccaggccccacccttggctcatgaagcctcttaccacagggcctcagttagctactggctgtgctgtgccagtcccaatcaaatgcaagcccgagggccattcccaaggccagcaccacgctgctccagggggtacctcctgccaaggtgttatcggcaggcctctgttcccaaacgccacattgggaagactggtgcgtcttgtctcagcctggctttgacaggctgggcccctggcctagctggtggctgcagatcaacggcactttgtcagcccaacacacctctaagaagctgaagtgcatactgaatggaggcgtctgcagaccttctgggctcggcagcccctctgcgtgtttgggtaaagaaatatgcagcttgagctgtggtcattgctgcctgagccgctgagctgcaatcaacatcaacaccacaaggacacaatattttctcccgatttacaacacgttcatttattttggaatttctgtgccagctgaggctacagggcggtgacagtggaaaaattgtcctagggccaagcaaaagagagtgttgcaaccaagctcctgttctgaaaaagggtgctcgaaagcagcaaaaagcaagcagagctaagagaatgaccttccacaaatagcagcccacaggacatgggtggccagtctgggaaacaactaatttggaggtccactattgatcctacaccagggtctgaagatgggccactggaatccagggttcctaagaaactgctgaaccccttggagtttccattatacaagatgatctgctttctttctcaaagttccccagggagtcagagatcctgtgacttcgaagctccccctcaaactcccccaaagtagcctttattggaaaacaccacaaacaagtgaaaatgataggatttggagtgagaaaaacttgcatttgaattgttcacactgctacttacttactgagtgttcttaactctctcagcttcagtttccacatctgtttttaaaatggacataataatatctaactatcaaagttgttgtgggaaatagagtaatttatcgaagtacacagtacaatgcccaactctttgtgggcactctgtacatgaaacttctgactccttttgttttcttgttttttactgggtcatttagatgttctctactaggctttattgtgtacctataaaatagatcaggatgctgccagtatggaaggtctatttgttgggctccctgggactgaaaacttctctcgatttaaggatactccatgaaaggaggaagtgatagagaagggaggcaatgaaagggaggggatggatgtgcaattaccagtattcccaacgagaggccctaggaagggcccactccagtcataattacaagaggactcaacagacaggctagtctgttccagatacaagaaggaaccttcaactgtcatctggaacaggcttccaagagataatctacttctccaagacaataacaagctgtacaacttaaggcaaaaagaaagggaaccccaagtgcattcttcttatcctactgagaagaaatctgatgtctgcccatgggaagtgaccactcaaggtgtcacaactagcatgaagcagagcagtgttctggaaccaagtctgactgattgcaaactggttgtctcataaaaaaaaaaaaaagaattttaacaagggtaacaaaacacactcaattcacattttatgttctataaagtcacctgaattagcaagtactgaatcattgcacctaaacaaaatacaagattaggttcctgcaagcctctggtcacaagatctccatcatcccatcaatttataatgttgttttatgagtgtttctgtttaaagacaccatgacggttaattttatgtgtcaacttgactgggctaagaaatgcccatatagctggtaaaatattaaatctgggtgtgtctgcatggatatttctggaagagattagcatttgaattggtagactgagtaaagattattgttctcaccaatgtgggtggacattaccaatctgttgagggctcaaatagaacaaaaaggcagaggaagggcaaatttactctctctgcttgagctgagacagccatcttttcctattgtcagccatcaatcctcctgattttcagacttttagactcagatcaagactaacaccatcatcccgactccacccccaacccccaattctcaggccttctgcctcctgaatcagactcaccactgggtttcctggttgttcagtttgcagatggcagatcatgggacttctcagtctccataactgcatgatccaattcctataataaatctttataggattataaatatatatatatatatatatatatatacacacacacacacacacatgaacacacacatacatatgtgaagaataggatttatctgaaggacaggagatatatatattatatatatatgtatccaacatatgtatattatccaatatataatatttgttctatttctctggagaaccctgacgaatacagattttgttcggtactgagaatggttctagaggaacaaaattttaaggataagttttctgaattggttctggggtttctgaaacggactctccaatctgattagatttaaagacactgatgactatgtttccaatgtaaaatgagcactgataatccatggagtgaattatttagaaacacaaaaaagtctgcatgggatacttctaatcacctatttacaagaagcgaggtgcagagcttccagatagctgaacacatggaggttcctggagggtggcatgcccagggagggcatggaagctccatgccttttcccctataccttgccctccacatctcttcatctgtatcctttgcaatgttctttataatgaaccagtaaactctttaggaacaaagccatcaagaaaaaagacagaaattgaaagcagccctactatatagttagaccatcaagacagaattgaattcattgccatcagcgtctgactatctgaatctaagtgagactttatcccaaggggagtctgacaaactttcaggtttctgatcataagactgctatctccaagggagtaataaagtttacgaaacagaataagatctcagagacttttaatctcctcaagattaggaatgcaagggaagcttcatttagaaaggcctgaagctttgaagcaattgtgattcctcatatattattcaaataaaataagtaccaagtttaaaaaaatacaaaagaagaagtaaggtgctagtaactctatatgtgatactttcaaacattttttgaaagccaaggaatataatgatgttggtgggttgctcctaatgtcactgggcaaagtggtgaaagaaaagtatgagcttaaggatgtgaattcaaagctcaagcattgcataaatgacctaagagcttctgggtatgccctgaaagaaagtcttatctcctgtagccatagggctgaaatttctgaaaatcaaatgcagaacctcatcttgcaatttgctgaattacaatgcaagttgaactcccagcatcacagggtgtccactgttaaagtgatggcattcattgggggaaaaaatggaatcctttaagttgaaatggggatatgtgggaagaccttgatgaacatggggacattaagtccctaaatgagtcttctttgccagtagaaaggttctcctcacccgcagtggaagtgatctgtccactcccaatagctacagcctttccatctctatctgaggggttaatcctgcattaccttaggaagtgataataacctctcctgaggcagctaccatgcaatatgatgctagctctcctcagaacctttccccatcactcttcttttcttctagacctataaccagactcatgtcccaggaggggacatactttgcccctaaagacaaagtatgaagctgtgaggaggtgtgctacactccaaaggaactacagtcatgccccacataacattttggtcaaccatggaccacatatacaatggtggtcccataagattataataaagctgaagaatttctatcgcctagtgacaccttaatgttgccatcttaatgtcttgacatcatagagcaatgcattgctcacatgtctgtggtgatgctggggtaaacaagcctactgtgctgccagttgtataaaagtatagcatataacaatcatgtacagtacatcatagttgataatgatagtaaacaattatgttactggtttatgtatttattatactaaactttttatcattattttagagtgtgccccttctacttataaaaaagatagttaactgtaaaacaacctcaggtagatctttcagaggtattccagaaaaaggcattgttatcatagatgacagctccatgtgtgttattgcccctgaaggccttccaatcggacaagatgcagagatggaagacagcaatattgatgatcctgaccctgagtaggcctaggctaatatgtgtatatgtgtcttagtttttaattaaaaagcttaaaaagtaaaaaaattaaaaatatttaaaaatagaaaagaccttatataataaggatataaagaaagaactgtttttgtacggttgtaaaatgtttgtgctttaagttaagagttattaaagactgggcgcagtggcttacgcctgtaatcccagcactttgggaagcagaggcaggtagatcacctaaggtcaggagttcaagaccagcctggcaaaacctcatctctactaaaaacacaaaaattagctgggcatggtggcaggtgcctgtaatcccagctactcaggaggctcaggcaggaggtacttgatcccaggaggcggaggtttcaatgagctgggatcatgccactgcactccagcctgagcgacagggcaagactctgtctcaaaaaaaaaaaaaaaagaaagaaaaagaaaagttattagaaatgtgtcaaaaagttgaaagaaaactaaaagtttacaaagtaaaaaagttataataagctaaattaatttattattgaagaaaaaagtataaatttagtgtaacctaagtttacagtgtttataaagtccatagtagtgtatagtaaatgtccttggccttcacattcatttactactcactcacagactcatccagagccatttctagtcctgcaagctctacttatgtacttatggtaagggccctatacaggtgtaccttttttttgtcttttctaccatattttactgtactttttgtttagatatgtttagacacatgagtacttaacatcgtgttataattgcctacagttttcaggacagtaacatgctgtacaggtgtgtagtctaggagcaataggctgtaccatatagaattttgtgtaaatacactctacgatgttcacacaatgacaaaatctcctaaaatgcatttctcagaacgtgtccccatccttaagcaacacataactgtacttgagttttccaatttatgcaatcagaaatctggggaacatgtgtaagaatggttattaagggtgtgggataatgatggaagaaacaaagtcagatgaagctgaattgattgatatgaactcaccaagcagtgattctgcatttaatgttgcagctcaagaagttagaaagagctctaataatttggttggttggctgaaacctggatcaaaagatgggctaccatgagcaaattggaaatttccagcctcctgtggtttaatgtagaggaagggattcaaagaattagggagactggaatgttagagtggatttgtcatttaagacctgcttacccacaccaggagagtccagaagacataaatttcaccaatactttgagaagtaaatttctgaggggagccccagcatccttgaagagcttcatgatcactattctctgagaccagaccttacagtaggaactgtagccattcagttggaaaatctaaatgcaatttgtgtaattggatccaagtgtggcactcaactgtcaaaggcagatggacatagttaccaacatggatagcagagtagatgcaacaatcaggatagtctgactcatgcagatccatggtattcgctggttcatcatggtgttcctagaagtgaaataaataagaagcctacaatgctcttacttgatccatataagcagaaaggctctaggtcaagtgaacaaaagtgtaactcagtgtaactcaaatcataaaaacagagtcacagcccctcaatcaattcccagacttgagctagtttacaaacacaaaacttcttgagtgaagaggaggtagagtcccgtcaaagaaaagcctagttcaccactgaacacacacactattaatcttactcccagccttcccacaatgggctcacagccttttatcagggtaactgtgcactgggggaaaggaaatgatcagttcttttgggagcgattagacactggctctgaacggacactgattccaggaaacccaaaacatcactgtgattctccagttagagtaggagcttatggaggtcaggcgattaatggagttttagctcaggttcatcttacagtgggtccagtgagtccattgggccccagaatccatcctgttgttatatccacagtttcagatgcataatgggaatagacacacttagcacctggcagaatccctacattggttccctgacctctgcagtgagggctagtatcatgggaatgaccaaatggaagccactaaaactgcttctacctaggaaaatagtaaatcaaatgcaatactacatccttggaagtattgtagagattagtactaacatcacggaaaatagtaaatcaaaagcaatactacatccttggaagtactgtagagattagtactaacatcaaggacttgacagatgcaggaatagtgattcccaccacatctccatttcaccctccctactcagcctgtgcagaagacagacgatcttggagaaagatagtggattactttaagcttaaccaagtggtgacttcagttgcaggtgctgtgccagatgtggttttattccttgagcaaattaacacatcccctattacctggcagttattgatctggcaaatgcctctctctctatccctgtctataaggaccaccaaaagtagtttcctttcagctggcaaggccagcagtacaccttcactgttctatctcaggtgtatcaactctgcagccctatgacataacttagttctcagggatcttgatcacctttcccttccacaagatatcacactgacccattatattgatgacattatgttgattggctctagtgagcaagaaattagcaactactctagtttattggtaagaaatttttgcagcagagtttgggaaataaattcaaaaaacttcagggccttccaccccagtgaaatttcttggggtccagttgtgtggggcatgtcaagataccccttctaaagtgaaggataaggtgttgtatctggcccctcctacagacaagaaagagcatgcctagtgggcctctttgaatgttggaggcaacatattcctcatttggatgtgttactctggcccatttacatgtgacctgaaaaatttctagttttgagtggaactcagagcaagagaaggctctgcaacaggtccagattgctgggcaaactgctctgacacttgagggtatatgatccagcagatccaatggtgcttaaaagtatcagtggcagataggaatgctgtttggagcctttagcaagccctcattggtgaactgaagtgcaggcttctaggattttggagcaaagctcagccattatccacagataactactcaccttttaagagatagttcttgacctactactgagccttagtagaaactgagtgcttaaccatgggccaccaagttaccatataacctgagttgcccatcatgaactgcgtgttagctgatccacaaaaccataaagttgggcatgcactgcaatacttcaccatcaaatggaggtaatacatacatgatcaggcctgagaaggccttgaaggaacgggtagtttacatgaaggaattgcccaaatgctcatgatccccactcctgctacactcctgtctctctaccaggctgcccctacagcctcatgaggagttccctataatctgttgactggggaagaaaaaacttgggcctgctttacagctggttctgcacaatatgcaaacaccactcaaaagctgtcaactttgggtggtgcttgcatgttgtgcagaccatacagcagcactacagtccatctttgggacacccctgaaggactgtgatgaagggaaattctgccagtgcacctagttgtgcagtttacttggaaggagaaatggccttcacgcagtaatatactaattcatggactatagccaatggtttggctgtatagtcagggacttggaagaaacatgattgaaaaattggtgacgaaaaaattgggggaagaggtatgtagatagacctctctgaaagagcaaaacatgaggatatttgtatcccacatgaatgtacaccaaagggtgggcttagcaaaggaggatttaaataatcaggtagataggatgacccattctgtgataccagccacctctgtcattgcccaataggcttatgaccaaaatagccatggtggtagagatggagcttatgcatgggctcagcaacatagacttccactcaccaaggctgacctgcctgtggccaccactgttgttcaatctggcagaaatagaggctaacacggaaccccaagatatggcactatttcctggagtgatcagcgagctatccagcatcaggttgattacactggactgcttccatcatggaagaggcagttttttgtccttactggaataaacacttactctggttacgactttgtcttctctgcatgaaatgcttctgccaaaactaccatccgtgggcttacagaatgccttacacactgtcatagtattccacacagcattgcttcttatcaaggattccacacagcattgcttctgatcaaagaatttacttcacagcaaaagaagtttggcaatgggcctaggctcatgcaattcactggtcttaccatctttcccaccatcttaagcagtttgcttgattgaacaagggaatgacattttgaagactcagttacagtgccaaccaggtagtagtactttgcagggatagaacaacgttcttcagaaagctgtctatgctttgaatcaatgtctgatatatggtgctgttagttgatagccaggattcatgagtccaagaatcaaggggtgaaaatgggagtagcaccactcactattacccagagtgactacctaacaaaatttttgctttttgcacaccgttcccacaccttttatgccttgctggcctagaggtcttagttccagagacaggaatactttcaccaggagacacaacagtgattccattgaacttgaagttgaaactgcctgccacctggccactttgggctcctcatgcctctgagtcaacaggcaaagaaagtagttatggtgttggctgaatggtgaatttgctctctctgcttgtactgagacatccatcttctcttgcccttggtcatcatcactcctggttctccagctttcaggcagactcagacttacaccattggcccctggaattctcgggccttcagtctcagactgaattacagcagatcatgggacttcttggctttcataactacatgagacaattcctatactaaatctcctctatctatctatctatctatctaagctagctagcttgctatcctattggttccatttctctggagaacattgaccaatacagacacctcgtttaatatattgttgactcattaacattgagctcatggccaaaaacactataattcatgcctgaatgaagtttatctaacagatttgttttctttgcaaggtacatcacactttcctgtaccttcagcattatgcctgaaggccatttcaaacagcaaaatcaccaacaacggctaatgcaaaaaaacgtggtaatagatagaccatgaaagaaacacttgtttacaatatgagcactgaaacaagaacataaagtatcacccagttcgacctcagttgaaacatgcatgtcagacaactcaattttttgccattctgcataggtcagtgagtggccacaaaagcactgtgggtgttgtctttggaactgcaaataaattttagcaatgggaaattcacaaataggaaatctgcaaataatgaggatagactgtaacttatcatccataccaagacacttttatgactgaagagttgttattaacaattacaccaggacaactggcataaactggactttctcaagcaaatggggatgtatgacaccctaattttagcttttgagattcctttaagaatctgatgaaagccatgagcacacacattttttatagacaattccaagggattcatagaccccaagtttccttaggctacacatgtcagccttaaggaacagttttaaaaaataatatacaaactgaaatatggtaaaagtatgcctaaaacttgaggccaacataatgatggagcaagtttatgcagagaactcaaggcattcatggacaaggccactatcaacataaagttgtctatcagggccattgcctgctcatcttggatacaaatgcgtactaaatttgaattcatacacaaagaatctcatcagagaagggaatgaaaacagactaggaagaatcctgaaagcctggcatggacgtgttcagagcctacaccattatcctattgccaaatgcccccatcttagcactcatgcccactatccgcatcagacatggggaatgtctacagcaaaagaggggccatctaggaaacagtttggactcccctagtagggagctcaaggagaatgccctccattgcctgggatcaagaactaaagaccaccaaaaagttaactgacactcccaccaccccatacctcacctccatgagggaaaagaaggcatctatggccactcataggagccacagatagcactgaaaacttacaattccagtgtgattaaacactgtaggttgatggggcctgagtgccattatctttaatccttcaccacactcctgcccccagtgctcacctcctcacttgggagagcacagctgcccagatgtgtgtttcccattaactctgctgcctctagtctggaataaagaagacattttcatgccaaattaaaaatgacttggaaatgggcattgtgttgggagaattggccttttgaaagggatataaaaatgagggaagctgatttcatcacccgcctacagacaggccatcaaagcatcctgcccctgtgaagcaggcaggccacctctgctctttcccctttacagactgtgttagcatctccattatttacccccagggtgggataaaggcacagcgcaaaggctaagatctttaaactgccttgagtgcccattaagcacattaataacatccactgtagtaagacttaccaatataatttccgacttcaagccaggagtgaaaaaaaacggaagtcagctgagtttatcaaccgaggagaccaccttaaattagaagagattacttagtgatggggaaaggaaagagttagcatggaagacctcagaacacccttggccattatttggttagtatttcccctcccccacacccatgtcattcaagggagtgggctgcgccaatttgacactaagagcatttaatcagtgatgctggtgttgcagtttggcctgggagggcagggtcccaacactacaagaagtcatattaggatcaattttaaaagaaaggcaatgatttgaaaaatggatcttgggatttgtgtcagtgctgtagttgcctgctctaaatgtgtgtgttgggggatagaggtggtgtcaggggaaggaggttgtttaaattaataaaagacaccacttcctgaaggattgggttccaggcaattcacatgtctgaactaacctttacttcacagctctccaaaacaggtaatactgggtccattccacagatgagaagactgaagcttagagacgtcgagtggcttatgctgggacccgcaagctggaatagacactaagaccttctgggctctgaatgaaagatgtgcttttaacttctcctctataccaccagagccacttgatctcatgtgggtaagtgtgactatgagaagagggaggaaggttggagacagatctgtttatttactggtttggaacagaagatatttcagagaagtctgatccacatgcccagggtatggggcctcaggcctcaggcctcggggctgtgtggggtcagaggagggcctagctggctgcccccatctcccctcctctcacagcccaaagccacaggacccagcctgcctgtctcctctcttgccttcctcattagctgggattgggaccaatttgtggatgcctttggtgcccttaggcagtgtttgagtcatcctccctgatgctaaagagaaaagaaaggaggagacagccatcccccaggagattggagacaccgggagagggaagcagtgatggatggaggtcaagagggagaggccagtgttcggaggtcattcccagtctggctttctttaacctcactcttccctggggacctgctcccccatgagatcacgtcccactacagacttcaaaaaaaatgggcttgctcgaggatcagccctcactattttgagaactgtgaactgaggggacccatacccttccagctccctggggcttcctagagctccaaggacagaatccaggtagaattcagcaggattaaggccagcaagaagtataggtcttcctatactagctcagatgatgcagtgtatttgcttcagaacttgacaaatacccatgggtctctgaaactggagtaggagccaagtcaggaatgcaccattgaattagccttagggattcagcctggtgcagaaatatagctccaccatttctagtggtgggacattggagaagctgcctcacctctctgagacataattccatgacttcttataagaatggaattaaagtggttacaggggcttgtaagcaattacacaccaaaatgttagttgttgttgtcatcaaaactaaaatcatgtgaaggataaccatctcaaatgtctcactatactgggttgtaaacctgggagtagcgccctgcaccatcattttatgtaaacctcacaagaatcctgaaccatttattatctattctacagatggggaaattgaggcagagctacattaagtactttactcactgtcattaaacaaggcacatggcaaagttgaaactgaaacacattgtatctggctgcaataaagatacataattatcccatatgccaaaaaaaaaaagggggaagggaatggggaatctatgcgaactgtgcaatgaagacagcaggaccacgaagacagagggagccaaacgaaaacattaaatgggcccctccaataagtcaagcacaatgccaggtattaacatagctattaataacatagctatgctataacatagcatcatgtcattaaagcagtgagcaaaatgtcagggactggcatgtgatctccaactcaaggtcaaagagaatactcacactattgggttgtaagtatgagcactattcatgcattcactccattatgtcttaagctcctaccatgtgccaagcccaacagctaaaagttaaccttatcgtcttgggcaattacacaccattctgtcatcctctttccaaatgtctcacagtattacaaaagcatccccaggagctccttgctactcctcaaatttctcaaaagcttatctgaagcccaaagaaacatggtttagaaactcaatccaagaccctttctcccaaagcactcacatatcagggtccgttaatatctatgcatagacttaaatactatccaagctgctctgtgtatttgtatcaaagcagtagtcctcctaccaaagatccatcaaatctgcagttgtcaaaatgacatacctttttataaaacttttccataccacactgggacactgaggcatgctctcttcatagcaaccccgtgaagtgtgaagactatatgacaaaatcctgttcagtgggttagggacctgaggttcttggaattctaggtagtgaatacaggtgccacagctccagatgctacagctagtaaatggcaaacaccagcaggaagccagtcttctaatacttccttctaattctagtgcctttctcctgaagtaggctacctgtcaaaggccaagggcaccttttatgaactatcttcttataggtgaaaaatcatcatgtgctatgttcaaaaagataggcttgcttagggatcagccctcactatttggggaactgtgaaccaaaggtacccttccagccctcagaggcttcctagagctccaaggacagaatccagatagaattcagcaggattaaggccagcaaggaggataggtcttcttgtaccagctcagatgatgtaatccatttgcttcagaacttgacaaatacccatgagtctctgaagtctaatttgtttattttgtttattactatttcagctccacttctgctgggaagggttgtttaagggaaacttaacaaaggtaaactctcaggacagtcttggtttgtcactcttactcacttgaggacctatcactgatcatatcccactgaatatggtcgactggagttagcataatgaatagcaaaaaatgcccagtgtagtatgagtaggtaaagggcactcttctggttggtgtgcaaattggaactttttaaagggaaattggcagtaccaaaattacaaatgcacaagccctcagatccaacaattcacttctaagactctattctaaagaaatattcacgagtgagcagaagacatgtgtcaaagctgttctactgcagctctatctattacaacaataaaaagaaaaaaacgtagagagccaaatgcttcttatcaggaaaactgttttttaaaaaatcatgctcctttctccaccatcgtggtatatgcttgactccgcttctcatcaagtcttctcacaagactttcaggactaaatgtttcctggccaagaaacaaaagcagaatcgtctcattctccagtggatttggatgaaaactggtaataaaatcagatacaactccaaaaggagacattggagaagaaggaagctgggtctataaggaattgcacatgagatgccacacatatttatgctgtgtcaaagtcactaccatcttatcatatcaagctgaaaatgtcactatctggacagttggacatgttttatcaggaatacatttttttctcttgtgaatctgttatgaatgcattggttggctgggttcagtaataaatatgtgagacctttcgtttcaataaataaataaataatcatgatgcctccatgctacggaaaagcatgcaaccattacaaagagtgtgctactctgcttgtaatcctatggacaaacactcatgtggttaaatgtgttaaaaataaagcaagttgaaaaaaataacatcgataataggatcaaacatttttgtttaaaaaaagaagatgaaaaagaaacaaaggaaaactcaaattgggacctaccccttgggcctcaaatagagtgcaggctgttctgggcctaggcttttggggaaggtggggcaaggagagggagctgtaaggtgctacatttgactactcttttctgaatatcattaaaatttaattttgaaatttctgttcttaatgatgtcctaagaggcttgtaaaaaatgcctacaagtgcagaaccatatcaagcataattatcctggccagccccactgactgaattgccccaaccctgtaccctctagggatggttgtccactttatatatgagtagatattgtgtattgtatgactgttgtatatacgtaccatgagggaagaacatataccaccacatcattaacactggttactcaagggagagatgagggagacgttcatatttttacttttatattcctgcatttacttttttagtgtattactttgtgatttttaaattttttaaatgaaagaaacattcatttaggcataatagaagaaaatatgaaaaaacaagccaacaaaatacatcagatgagtcattgtctccacgttggaaaaatcaaactggacttctctctatcaaactctaaccaaaccaaatcccatttaatagcaatatggcatatcagccaggctcggtggtgcacacctgtaatcccagctatttggtatttgggaggctgaggcagaatgatagttttgagcccaggagttcaagaccaacctatgcaacatagcaagaccccatctcattaaaagtacatgtgtatatggctgtcaatatcttacgaagaaagttaatagggaagggaagtgaggaattagtctattttgtttataacctggaacagtgcctggcctatattaggtattccataaaatattattgaatgtggaatgaatcgagaggaactcagggtatacaaagacaggtgattttacttgatttaagcaattgacattaggaaactgatctgtggccaaatatcaatacccctgagtgcaagtaacactggtctgtaattagcatatcaaatgtttacgtacctataactactcctaaattgcttttacgcattcactctccaaatatctattaaagctccaagaatcagtccctgcccttaaggggtttccatcaagctgtgtgagtaaacctataaatccagtgtcagaaaaatactagttagcagaaatagtcctggacaaagatagagtcctggctaagacttcatctgccataactaactgtgtgacctttggcctctcaccttcctgagctgtcaaaatggcagggcttgagccagatagatatgtctcaaatatctaatctcattatactcctgagaacaggttctccaaaatccgggaaccctagaccccagttggagagaccttccactaaacatcactctcaagtcctttcagctcacaagtgctgattccaggcatgttgacttttgtctttaaagtgtcctaagaccagcaagtcccactctactaagagcttcaaaacttccaaagtgagcactgattctagattaaaaaggttttcttaccaagctagcattctctctgtttgtcattgaactaatgtcatgaatttaggttggtattgagataatcaagatatacattatcctatattgctccatttccttttattgtctgtgggtaagagtgcagcctcagaggtgagatagccctccatgatactaggtaagttactaaaactctgtaattctgtttccttgtcagtaaaatgggaataataacagttcctactacatagaattgttatgcagattaaataagaatttaattaatcttgaattaattaacatgggttgaatatttattagatagtaaatgttcagtaagttctagctttaattatggtgattacttctgctaggttataagcttcttgaaatcatgaaccacgcatatctcaaactttattaagcaattagtacttaccacaagtttattattattcatttatataatagttatgtttagtaataagaatgacaaaaaagaaacatactgaaagtaagattattgcgtttgattctggtttctttatgttacacttctttatttccttcaagttgattagttgtacttaatgcagttttctttctttctcctaatctgacattaaattttttcttgaaaaataaagataaataaataacaggctgggcacagtggctcatgcttgtaattccagcactttgggaggctgaggtgggcggatcgcctgaggtcagaagttcaagaccagcttggccagaatggcaaaaccccatctccactaaaaaaaaacaaaaaaattagctgggcatggtgacgggcacctgtaatacccacctactagggaggctgaggcaggataatcgcttgaactcgggaggccgaggttgcagtgggccaagattgcaccattgcactccagcctgggtgacagagcaagactctgtctcataaataaataaataataaaaaggtttttctgaagattcatgtgaagattaggatcacagcctattttattttttatttttgagatggggtctccctctgttgtgtaggctggagtgcagtggcaccgtgatggctcactgcagccttgacctcccgggctcaagggatcctcccacttcagcttccccagtagctaggactactacatacttgtgccacgacacccaactaattttttttttttttggtagggacaggatctctccatgttgctcagctggtctcaaactcctgggctcaagcaatcctcccacttcagcctcctgaattgctgggattacaaatcccactgtgcccagcccaaggagcacagccttgagatttagacttagttccaatcccagcaccatctcttatgaactaggcgacactgagcaagttactgaatctttgttagcctcagtttcctcttacatcaaataggtataataatgggatccagcttgcattcaatgcatggacagaaatggtagtttccctaaacagtgaaggagggtcatgaaaaaaggactatagatgtaggatgggagactgaaatttgaggtccgacaaagcaagggtgactttgagaacaccctctcaggaactgtagttcctgtttcctccaggggttgggggctgggagtggtggtggggtaggaggctgtggaagtgggcaaagctctagcttccccaggctgacccctgctctgattatgttacatttctctcttgggtccagccctgtgcacagctccaatgggcttcattgccctgagctggcatgttgcaagattgaatcacaaatcaatactgctcttgttatgaattccaatctgcattcaaaaagttgcaggccctcccaggtcccaaaccaaagccctcccaggtcctacccccaacccctggctctcgcagctcgcttaataccacaaaaagctgctgcttttgcgtaaatatgaggaaattaagttcctgaaagatctaccaagaggcagctaatggaataatggcttgggtaagcttaggttaaaaagaaggagcattcaagaattaaacagccatcgtcatcagtgaaggaaagtcacctagaagtagaccaaaaaaggttttatttcccaagagttttataatctgacttggtgtcctggactaggaaactgagctgaaagcccaggggtgtgcagaagcattatgaccaagtcaccagctctaagctctgagagccccaaaacccgaattagggctgactatcccaaccgccctcacccacccacacatctaccctcacaattccatgttgcatctaactcaccctgcaaagcaacgggtgtgttgggacccagccagttgggagcctttgtaaagacaagatccttttgctttgtgtttgttttaattttcccaagcagctcagatctaacatgaaaagtgcaataaactgggagtatcagtgtccactgaaaatatcacttcacaagtgaaaatatatccaaacagccagttgtagtttgagaggctctccctcctcaaaaatgcagctgtcaccaaaaatacatttgaaatctctctcttcctcactctctctctctcctttcccttccttccttcttcttccagctctccctctgtcttgcaatttaactttaattgccctgtcagctctaaaggctgctaattgacgccttttattctgggttaaaactcctcaggaagaaaagagctcgccgggcccccagattcgaccgatttggcacgcttgtctccctgcgaattgaagctgggtgctgctagtgctgggggcaggcgtgggggagtcgcggaggcggggaggggggctgggcagaggttggaacgtctatttttagtgagggttttatagagtggatccctgtggcttggctccacactgaaatattgtcctcgtctcaatgacataaacacagggcaacttggagatcttggcgccagctctggccggagcctgtgaatgggcagaatggtgggatgggagcaagaaccctactgtaattacaaataaatccgccacccacccccaccccctggctctcccagctcgcttaataccacaaaaagccgctgcttttgcgtaaatacgaggaacttaagttactgaaagatctaccaagaggcagctaatagaataatgacttgggtaagcttaggttaaaaagaagggacattcaggaattaattaaacagccatcgtcatcagtgaaaaccacagacggaggcaaagcatggactccgtcttgagctcctggagtaaatccagtgtgttgcttccctctgaaattatcaagcattcaggctggccctggtatgggagaaattggaactgataaattggaaccaattagcaacaaggtctcaatatgattctttggaatgtccccggccaggctggatgaagctgtcacccagggcagcctcagacatggagccacactttccaaagcatatttaaatatagcctcgcttccctcgaaatgtaatcccaaccctcatttcatccttggaagcttggggggtggagtgcagggtgaggtgggattttcataacccccatcccccactcccacaaccctgtaaataaataaaagattacaccaaattccatttgaagttgtcagtcccggaatggaacttttatcccattatgaatttcatgggtgagaccggtcagactttgaatgtggctaacacctccattgaaaggccctaattgcagttgtaggcactgactgtttgcagacaccgcactgtacacaccttcacattcctctgaagaaagagcatcctatgagagccggccagggcctcccctcaagtcagtaggactgtcaaggtttcacttaaactttaaaccaaagttgccctattgaagggccaggtgctaatttgggattctgaggttcggcagctttgccttggctgacagggctgttactatacccagggggctggctggagtcgtgcttcagcctcagaggctaccaggaagggagtctttcagtccaaatggacccttgaaggaccgcttttattttcagatgaacttcctctgagcctgaaagcatccagggcttggctgagcgacaaaagaatggagaaatgcgttttgcacacagctactggcctaccagaggcaagaaagctgcctgttaagagtcccaagggaagggagcctctcccttcacttcgggactcctggtggggaacaagccatggaaaggtggcctatgagggagaactctttacaaagttctgctcctccctcaatggacaccactaaaagttttaatttttgtgttgtggtaaaatatacataaagtaaaattcaccattttaaccatttgtaagtgtacagttgagtggcattaagtacattctcattgttatgcagtcatcaccagcatccatcaccagaactttttcattatcccaactgatacgctgtgactgtgtccccacccaaatctcatcctgagttgtgacttccatatttcccatgtgtcatggtagggacctggtgggaggtaattgaatcatgggagcaggtctttcctgtgctgttcttgtgatagtgaataagtctctcaagatctgatgactttataaatggaagctcccctacacaagctctgttgcctgccgccatgtaagacatgactttgctccttgttcgccttcagccatgattgtaaggcctccccagccatgtggaactgtgcgtcaattaaacctctttcgttcataaattacccagtctcaaatatgtctttattagcaatgtgagaacacactaatacaccaactaaaactccatatccattacacagtaacttcccatttcccctcctcccagcccttggcaaccatcattctactttccatctctatgaatgtgaccactctaggtacctcatataagtgaaattatacggtatttgtccttttgtgacttatgcttgtttcacttagcataatgtcttcaagatttacccatgttgaggccatcagaatttctttccttgttaaagctgaataataccccattgtatggatataccacattttatttatccattcatcaatgaacacatgggctacttccaccttttagctattgtgaataatgctgctatgaaaaaaaagatgtataaatatctgagtccctgttttagttatgtgaaggatatacccagcagtggaattgatggtttatatgctatttccatttttaattttgtgtgggagtgccatactgttttccactgaggctgcattattttacattcccaccagcagcacacagggtttgcgtctctccacatcctcatcacatttgttattttccttccctttttttgatatcaactattctaatgggtatgagtgctatcacattgtggtttttgaacaccaaagatttgtatttattttatgttttctttgatctctttcctttttcaaagaaataatatggtatagatatacgtaagtatccaccaagtactttacattctgtccctctccccagaggcaagcactgtccccaagttggtgtgtatgattgcaattcatgtataaatttaccaggcctatttgcattcattaataatttatactactattttgtgggtcacattggattccacttttgtgtccttctccacccccatcactaccttccacatctataagttgtacaaagaataccaaaagcagaattccatatgaaaccaaaaaaggccacatggaataaatcaggagctttggagttagtcagagagctaaacctcagctgtgttacttcctacttgtgtgaccttggtcaggtcacttgacctctctgagctttagtgtccttgattataaactgagatgtctgcaggactgaataagacaacaaatataatgcactatatcagcacatagtaagagttcagtaattgggaaggtggagggggaagagaagaaagaggttaacattaattttcttgggccaggtgcaatggttcacacctgtattcccagcattttgggaggccaaagcaggcagatcacttgagtccaggagttcgagaccaacctgggaaacatagcaaaaccccttctctacaaaaaaattcaaaaattagcctggcatggtggtgccacctataatcccagctactcgggaaactgaaatgggaggatcacttgagcctgggaagttgaggctgcagtgagccatgatcatgatactgcactccagcctggccaacacagcaagaccctgtctcaaaataaataaataaataaattaaatgttcttgttgagttgttgcctctccacagccatttctcatccatgatccactgactatttttgcctgcatcttcatgctgccccgaggtaggacagaacatgtgcaaaagtataagacaaaaaaaatgcagccctgtttgacttttacaaaaatgttgatgtaagtaatggagagtgagtgtccccctctccccttccacctcccacccagaaggcactggagagtggaggaaagtaaggaaggcaggaggcctgacccactctgccaagtcactctacttgggagagaacattcagcacaggccctgagcctggctagagaaactgtaatctaatatcttaatccatttcttcttcaaagcattgccctttgtgccaggtggacagagcccgaataacatggagctgttcctgagaagctcttgcattgggctgcgtcattcaggctgggaaaagaatactcaaaggtgcacctttgacctggttatctggacaattgtgactggggaatgacagtttagaggacctaaaagatgtttagggaattgcacccagtcggtgttgacagtgaacccagccattgatccagccacccccagtgagtgctgaccatgccagatggtgagcaaggctctttggctacacaaagaggaattggacaccaaggagagctgtcttcagagagattagtgctattctgcccttttggaaaatggcttctgagtccacctctccaagaacatggcagggactgggagcggtggggtggaagggaagaaaaatagttccagcaaaaactagatcctggggtcccaaggatgggagtggcagcctgcaccatcttcctttcggaggacatgggctgaggttagcctgacatctcacagcagctgctgcctctccagaatgagctgggatcattcaactactccccaccccaccccaacaacagcccaagctgcagcttcctgggatatagccaaccatccctcaccctctcccctgccctgaattgcttctgctgccaaaatcagctgacttcaagatacagagctgctaatttgtgaggattcaggctgctgagggtgttggtacaacaaccaggccatctctagttcaacatggataagacattggtgtgtaccagttaaattgtaaagcatctatttgggtcaaactggtctttttattttccagacacctatgaggaatctgattaaacttttttctgtaaatagacagactcagccaagaagaaggatgtgatttataagagaagatcaaacatcataagctgttaattaagaaatgggcattgttttgaccaccatcgcttccatctacccactaccagcatccaatatggtaaccagaagtaattaaacaagttcagatgttcgctcatttactaggcacctactgtataataaacacaaggccaggcactgggaataaggagttgaactcccataaagagctcgttgtccagcaggcaggacagccatcagcctgaatgcagtcactaatggatgagctagaggaaggaatgagaaggggtaggactgagaggagggagcaatttatcttcccagacagaatcaagaatggaggaagcaatgtttaagcaggatccggagggtggcaagtgattttgcaaaagggagaaagtgagtaaacagcacacgtaacagtgaggaggtgcaggctatgtgtagagacctccaagctaaatatacagcaagcagcaaagagtagaacaaggtaataggagaaaggtagattgtggtcaggttggaaatggcaccaaatgtcataactttatcttgagagtaaccagaagaatccttagaggtttttgaataattacaattcccatcctatacagcagtttattttagcctgtttcttcttcaggaatactaagactttgggagaaatgagggcacctcactaaacttcagcaggaagctatctgtcttgggtgggccagtaccatctgcaagccttacttctcagtggtgaccttagggtaaatttggtgagagataaagaccccatctaggatctcatacctgtgagatgaagaatagctgctacaaatgacaagtcagagatctcatcaaacccctaccctgcaaccaatgacggccctgaagtccctagaaaatgtacaagtgcccccaagacttgctttgctgtcaaaatatttagaagaagcatatttaaatcacagacggaacaataggactagctcagcagtaaacgttcacactgttgaagaagcttaaaccataaacatttagtctaaaatgtagctgcctctccttctgggctagggtttgaaagaaaagcagagttctataaaatgtgatctgccaggattttcttacccccgtggcatgatcattacgatgtctcttattatatttaaagccttatccgaggtgactcaaatccttgaggaggtgcgggaagcagctttgcatttttctcaacgtattctgctgaaccactgcagtaattcacttttgaaacaatgcaaagggaaaatgagattggaatcaccaccttgcctcattactggcccgcctcctccctgccacctccaggcactttaagggcccttctcccagcattttagggattatctttgcgagtttaatcaagctttacattaaccagttaacatggttaagcttttgtgtgagaaaagagacatttgtctgaaattgtagtgtactgaattcattttgtagggaagggacaaagaggcccaagcctggctaccagctctaaccttatccattctctctatcatgagtgaaaaaaaatttttttctttaaatttataagcataccaacaatttataaaactaatttttttccaaaactccaatgaataatgaatcatatctcaaaaaaagtcctgtgttgaaacacaagccatgctggtaaaggactggccactgctttatttatttttattcatattttaattaataaatttacttatgatcttaacctattatgccaaagaacagattgtaaaacatttgtggttgcccagtgggttacaggaaaagtaagaaccccttttagaattttaaggtggttttttgtgtaactttgaagccttcctttcatatgttgtaggtatgttttgtgaattaaaataaaaaagcaatttttttttccttaattgagggcatttttaaatgaagctgagtaaagacactaagatgaaaccttagctataagaaaaataaaaaaacagttgggggtttcagagacattgtttgtcttaagagtgaggtggagaagcttgatcaaaagccttgttttactacagtcatgctccattatgggaggtggggatgaggatggggtcgggggagtggaaggaagatgaaacgagccctctcttctactcaaccaggttgccaaaagtcactgcccacaagtaaacctcccttgcctgctggtactgatgatctccggagtcaaacgtggattcaaagcaagacatcagatgcattaagaagcccgctttgggctcacggctctgagctaacaagcctctctctgcctccatagatgaaccttgagtcaagagcagagcattgagacaccccctcatttctctggccctcaatctctctatctataaaatgggcaggtagttgtccctacctccccattttaccaaaggataagttcctttggtacttatttagggacctcatcctccaaaccctcaacttaggtaacttatttccaatcatttgcttccacaccaaactcattccagactgcatagatgtttttcaatcaagcatgagagtggtttttggttcattttagttttatttcccagcccagcagtgggttttcactttatttggaaagcaatctgatttctctgtagatgcctgagacaggaaatcaaagtgtcatgaaacagtgtctgtcacttacttatatgtgtgcgcacacgcacacacacatgcacacgcacatatgcatacgaaagttccacaaatgtgcttcttcactttaccatcataggtgagcactgcaccatttaactcaacaaaaaatgaagatcacctaagaataagaatcgtgcctaccctgcagcctgctgctggcttcaaaaatctttttaacatttagaactttaagcaccattttcagttttactagtgcctaatagtaactttggggcaaattgtttcttctaaattcactgactttaatcttttactgattttttccttaaatacaaaaatactgattgccatctttttttaaatcagatttacataaagtaaaaagtgagcttctctctcttcgtcacctcacactttaagggtaataaccccattctttaaggataatcattacaattaatgacttacaaacattttttgacatatttcctcgtacgtaaaataatccctgcatagagactaaaatcaagggctctagagttgaaatcctagatttcaaacttgatgtaacacataatgaatttttgttttcacttctttttttttcttttttttctttttttcttttttttttttttttttttttgacagagtctcgctctgtcacccaggctagagttcagtggtgtgatctcggctcactgcaagctccacctcccaggttcacgccattctcctgcctcagcctcccgagtagctgggaccacaggtgcccaccaccacacccggctaattttttgtatttttagtagagacagggtttcacgatgttggccaggatggtctcgatctcctgacctcgtgatccgcccacctcggcctcccaaagtgctgggattacaggcgtgagccaccgcgcccagccacttcttaatagggactgtcttgaaatatttaagacctataatcgccatatttagatggtttctaaggtttgtttcaaatatttctaaggtcaagtctaaattcaaatcctatttaaaacagcttaagacccttcagtggtccaccatgcaaggcctctggtcttccagtctattcctcaagccctaactctgggcactgccaacccacccccagaatttggattatgtcacacctcctccccactaccccaaatgtcatccagtcagtggcctctcctcacccatttgttctgtaaccacctcttgatttttcaggtctttcaacctggacatcaagccaggcatggtggctcaagcctgtaatcccagcactttaggaggctgaggcaggaggatctcttgaggttaggagttcgagaccaacctggccaacatggtgaaaccctgtctctaccaaaaatacaaaaattagccagacgtggtggcgcatgcctgtaatcccagctacttgggaggctgaggcaggagaatcacctgaacctggacagcagaggctgcagtgagccgagaatgatgccactgcactccagcctggatgacagaatgagactctttctggaaaaaaaaaaaaaaaagaaattaaaaaatcaacttggacatcaaatcttttagggagccgtttcggatcccccagcccaacatttctatgcctcttcatggcagctgacatcctgaattgtaatctttatttttttccccaatcatctgtgacctcctcaagagatgagactccatcttctctcttgttgagcaatgtgtctataattggggtacatgcctggtgatgagataaatgaaaaagactgatggatgacagtaggtggtcacagcaagtcatatccaaggctgcaccatgacttgaatggtgaggagacggagtaggggctaggaaaaaagtcagagacgtgaaggttttgtgttaggtggattcggtagctggaacccgtgattcatcccacccacctgaaatggggtcatttttcaccttatttttcactccattgagcttctgtctgcttgttatcttgagcctttgacgggataagggagactagaccttattatctcaatacacatctatctgaggcagtgggatgagaggatgtgggggaaatgcaagtgtacactgagatgggtgtttgtgtgtttttggcaggaggaggcagtgtatcaatttcccatggcaggtcgctaaagggaactgccttcagaaacctttaagcctagataggaacagaagaggcagaagtatgggtatgtgtgtggtttgtgtgtgtgtgtgtgtgcacgtgtggtgtgtgtggtgtggtgtgtgtgtgcgtgtggtgtgtgtggtgtgtggtgtgtgtgtggtgtggtgtgtatgtctgtgtgtgtggtatgtgtggtgtgttgttggggagcagtgcatagcgagtgtgtgtgatatgtgtgtatatgcatgtgtgtgcacgtgcactcatgtgtttgtattgaataactacatatgtattggggtcgggaaggtaggctcttcagtacaggtaggctttcaatatctgaaaattgtgtgcctgtgcaaacctatgacagtgtatggtggggagcgggaagcaagtcctagagcatttagagtttgtgtttctattcgatgacagttatccgttcacatcatagcccccccatcattttggagattcttgtcccacactagcaatactgtatctgtagtattccattcattccccttttgaaatactgggtcacatatggtaaaagtccgttaactcagaaccaagtgttgttggtctttaaattttatttagaatgtgtgtgtgtgtgtgtgtgtgtgtgtgtgtgtgtgaagcagtggctagagagagaaggattgtacaaggatttcctttccataggaaaacgttgggtccatcctagacccagacttcagccaaggaaatgcaatgtgaagcccaggagagctgagggcaggaaagcggagaagatatgcctgctggcgtcgcccccacccacccccaggccccccacatcagggcaggctaaacatgccgaggcttctgtctccagggctggagagaggcgccctcgttaaaactcagataaacagtttatcaggagatgaatgagccaccgggctccagagacgtctccccttccccagtgcggagccagatggggagggggctacaggcggagcaggagccagactgaggaagggaaggggctgtcggggctggaataagctcgctgaagctcctttcctcctttggtcttaaacttcgtctctattttgggaaatgtatttcacatgtatttgcccacgttcccaccccagaccacgttttagagtgatttcccactctctccctcctctttctctcctagtttccctcttttgcccagcatgcccattttagttacttctcaccagaatctaaccaccaatgggacacacacacacacacaattataatgccctgtgaagctgaactgggttctttctaccctcactgtgagttctgaactggccagggctccccagcacccaggaggctacatggagttcaccaccctctgacctcagtgccacctctactgtcaccttctggcagtcaagagagatatgtgacaagcctcatggctgacttggtctccctttgctaacttaagtcaagcccaagaatgccattttggggtctcattaagagaaagcccatcagattctatatttatgggtcccaagagattgtcagaaacagagggtagagaatttcaatgcctgggatgacaccagctgtaaaagatggcagttctcatgcattctccaaggacgtctcatggtccttgaaaggtagagtgtctcacccaaggtcgcacagctggtagattgcaagttttctgacctcaagccccatgccctttaggcgtcacccacagttgccttaggtctatgtttccagggccaaagaagcaagaagattgtcaagttgttcttcgaatcatgatagaaataagagaagatacataaaagcaccctcaggctcctcttgcctttgacctggagttgccccagcgactgtttaaaggagtgcttccatttaccttgcccagagaattttgcagggacagaaacctgggatggggctacccagggacaggcctccatttatgttgttcattaactcttcctatgtagcctcctgaggcctaagtccccaaccaagccccactacagtccaagcaccgcccacagcgagagtcaagctgatagccgtacttccattggcccatcttccgcccacagcttcctttgcaagaaatacaaccctctttgtccagttttgtcaagctccctcttcaacagaaccacagaagcatcaaaatgggttgactacagaatctcctaagaaactacagtcctccctccctcaaactcctgaagcctggcagccctcaagttgcacagatggagtggacagaaagcaagtccaaaggtgttggagttgatttcagcagcatcctcaccccttcaaccctcttctgctcaaacctgagatggttggccagttgagggcagtggggttctctgaagaagtaacgtgttgtaaaaccattgcccgatataggctctgccccaggcaccttactaggctaggcattccttacctcttttacgtggcatgattctgagaggtgtgtatcatccccatcttacagatgagagaatggaaacggggtggttaagatgactgttttaaaaaggtaacacagccggtgaggggcacagccagaattccaacttaaatccacctggtccaaaagtcgtggtgcttccctgtctgggacatttcctcttccacctctcatatccccagattttctggctgtccctcatacaagtgtggttcccttcttcatgtagatgtatatcctatctctcaaatctcttcctctccatactcagataaatacatccttcttcatgaagctcagctaaaattcagctctaccattaaggtcttagtacttcctagtctctgataccaacatccccaggttcactcagtacctaagcgcatgggctactccagtgtggcacagagttaggagttgcaagcttcccaaatgtggcatttcagaacttcacattgaagaggggtagatatggtttgaaaacagtatagctaacataattgcttgggcttctttttggttataataatgtattttaaaaactttaaacaacattcaaagaagagcatgatattgttatatctatcaaaaggggacatggattttaaaaagaaaaggttataaaaaactagtccacactgttatgggaatttataaatttttctgatgtccttttactatttcttcttgtggttgtcatatctcccctaactgtactacaaaagtcttgcaggatggagactgactatgaattttttcttctttgtatttttcctgatggtcttcacccagtagatactccataaacaggtcacccaatctgttctcaagcatgatttgtttctggttcctgagggaccttttttgctgttcagtcaaatctgctcagcccaactaaataaaggatctgggttggttttcaagcaaaaataggtgatttgaaggagagaagagggggattaaaagaacagaaaccagcatgatataatgtcattaattggaacctaccatctcaggagggctgagctagagtttagcccttgaactccactaaataattttcttagttaattcacatcagtgacaaaattgctctggaacatgtaatcttcataaggaaacaaactagtgctgaatccccataaagcacataaaaaagaaagaggtatgcttaggagcctactatgtgctaggttctttttttggagggggaggagttggggaggtgggaacagagtctcactctgttattcaggctggagtacagtggtgcaatctcaactcactgcaacctttgcctcccaggttcaagtgattctcgtgcctcggcctcccaagtacttgggattacaggagcctgccaccacgcccagctaattttttttttttttttttttttttgtatttttagtagagacagggtttcagcatgttgggcaggctggtttccaactcctgacctcaagtgatccgcctgcctcagcctcccaaagtgctggtattacaggcatgagccaccgtgcccggcctgtaccaggttctaatcacacattatttcaaagtcagcccaattcaaacaaccaatgggttgttgttaactccagtatccatcaaagcaagatctccttttgagcagtcccttgatagtctaattctagttgtctagactttaaaattgagggaaacgctttcagcggaaactgcccaccccttttaatagaggttttgcagaaagactgtagtatgcaacaaagtgttttcttccttagacagatgataaactttgggagttggggtggggcaggttgaaaggaaaaaccagatctttggggaaagaaagttaagcgatttaggttgtcacaatgggacctcttaactcccactccatggaagactggcaaatacttgagtcatccactccaagtctctcttctccagctttttccagattccaatcacattcaccacaaagaaaactgagtttgcattttaaagctgagattgagttcctcgtccaaggggaaattaaccggaggtgtcccttcagtacccatctcccatcaaagagaaactgcttctgaacaagagaaagcatcgtggaggtttatttaaaatcacagaaaggtagggctggaagagaaatctattaatagttacgtcactaatgcgaaaagtgagaaaaatgacttgtccgagttatatcagggtggaccccgggcaagactcaggtgcctctgctgtcagctcacctttcaagtttctggtccccactcgcacccactgagaccagagaccgatttacctgaggcagaaggtgctgcacgcattcttgtgaaatttgaggggaccgagaaggaatctcaggaagtttgtttacactgggggcctggagaccttcgggaaaatagccagaaccaaaacggaccagtcagcagacgcagacacacacaaagtgacagggacacagaagcagaagctgaactgggcagagcgggcagcggccgacccacctcgcacggccgcccccgccagcgccaggtgcagggctcatagcgggccagcagagggcgcgccgcccccagggagccgagcggcggccgcgcggagccgggcgggctaggggagccgcaggcgagccagtcgcgcccctgaggctaggccactcagggtgcaggacccggccaaggaggaggaggatggtgaggagcggaaccccctcgtgggcccgaggggcagacagacaggagtgcttcctaagaattacatcacgctgcgcaacgctgcggctctcggactccctggtgcaaaggggggtggggtaggggctgtgtgtgtgtgtgtgtgtgtgtgtgtatatatgtgtgttggggggaggggacttagagcaagagcccgggagagaagaagacgcgctcggggaaaacgctccatgcacatggagaaatttcttgctccgaactgcatgcaccgagaaacgagcccccagcacttccccgctgctcccctcccagtgcaaagcacccagctagtgagaaaccctccagccccacctcaagcaccgccccccctccccaaacaccggctctgcaccctccagcccggctccagcgccgccgcgagctttccccaggactggccctggcggggcgcctagagccccagttgcattgctccaggagaaaggaggggggcggtgcattttgcaggaggaggagaaggggggtgggtggtgggggagagagaaaattgcgcggagacctgccaagcgccaccgccgccgccaccgccgctgccgccgccgccgccgccgcctgtgagctccggcgggcagccggactgtcggcttcccggggcatctgggtccggcggggcacagccctgggcgctgccgaagccgccgccgccgcctccgcggcgagtacaggcggcttcccccggagcctgtgcagctccagctcctcgggggtggagaagtggggggtggggttgttgtttggggggaagaagggggagggggcaacgccgagagagtcagtggtttccatggtgatggagctgaaagtgcaggaaatttaaaggcttggaccctgcgagacagacaaaccggtgccaacgtgcgcggacgccgccgccgccgccgccgctggagtccgccgggcagagccggccgcggagcccggagcaggcggagggaagtgcccctagaaccagctcagccagcggcgcttgcacagagcggccggacgaagagcagcgagaggaggaggggagagcggctcgtccacgcgccctgcgccgccgccggcccgggaaggcagcgaggagccggcgcctcccgcgccccgcggtcgccctggagtaatttcggatgcccagccgcggccgccttccccagtagacccgggagaggagttgcggccaacttgtgtgcctttcttccgccccggtgggagccggcgctgcgcgaagggctctcccggcggctcatgctgccggccctgcgcctgcccagcctcgggtgagccgcctccggagagacgggggagcgcggcggcgccgcgggctcggcgtgctctcctccggggacgcgggacgaagcagcagccccgggcgcgcgccagaggcatggagcgctgccccagcctaggggtcaccctctacgccctggtggtggtcctggggctgcgggcgacaccggccggcggccagcactatctccacatccgcccggcacccagcgacaacctgcccctggtggacctcatcgaacacccagaccctatctttgaccccaaggaaaaggatctgaacgagacgctgctgcgctcgctgctcgggggccactacgacccaggcttcatggccacctcgccccccgaggaccggcccggcgggggcgggggtgcagctgggggcgcggaggacctggcggagctggaccagctgctgcggcagcggccgtcgggggccatgccgagcgagatcaaagggctagagttctccgagggcttggcccagggcaagaagcagcgcctaagcaagaagctgcggaggaagttacagatgtggctgtggtcgcagacattctgccccgtgctgtacgcgtggaacgacctgggcagccgcttttggccgcgctacgtgaaggtgggcagctgcttcagtaagcgctcgtgctccgtgcccgagggcatggtgtgcaagccgtccaagtccgtgcacctcacggtgctgcggtggcgctgtcagcggcgcgggggccagcgctgcggctggattcccatccagtaccccatcatttccgagtgcaagtgctcgtgctagaactcgggggccccctgcccgcacccggacacttgatcgatccccaccgacgccccctgcaccgcctccaaccagttccaccaccctctagcgagggttttcaatgaacttttttttttttttttttttttttttctgggctacagagacctagctttctggttcctgtaatgcactgtttaactgtgtaggaatgtatatgtgtgtgtatatacggtcccagttttaatttacttattaaaaggtcagtattatacgttaaaagttaccggcttctactgtatttttaaaaaaaagtaagcaaaagaaaaaaaaaagaacagagaaaagagagacttattctggttgttgctaataatgttaacctgctatttatattccagtgcccttcgcatggcgaagcaggggggaaaagttatttttttcttgaagtacaaagagacgggggaacttttgtagaggactttttaaaagctattttccattcttcggaaagtgttttggttttccttggacctcgaagaagctatagagttcaatgttattttacagttattgtaaatatagagaacaaatggaatgactaatcattgtaaattaagagtatctgctatttattctttataatatcccgtgtagtaaatgagaaagaagtgcagagcaggattaaagaaaaccactaaaaccgactgcgctccacactgattttctgtgttggtgattgatgggggtgggagggcgtgggagggggcgggtaggggatgctgctgtgcctcctaccccgttggggaaggggctcatcccctcggactcccctcctgtggtatgatggaggtgacttagttttttgagggcgttgggggggggggcgatattctctaacccctcactaaaacatcacgtggcctccgcctagtctcctagcttttccccctatgtcaccaaagctcgggcctgtagtgacctcgacacccagccggccccctggagctgaccccaggctgggccgaggggcggggggagggtgggcggccgctttgtcctgcctgacaggcccttcacaatggggacacgtgtctttcacacctaccctgggggcggagtgccgctgaaacttgacccccgaggaatggggagggggggagatcagagcgcgcccacccagatcccgccacccctcccgcctcgtaccccccacctcaatatccagcccatgttaaccctttgcatgcccggaagctacggtggtacgaactgaggcaatcccttggaatcaacaaggctcacagcctccgggatcttgcaggtccgagccccgaaatcccaggccctcggccggaggtgctggggatatcagggagatttgacactggcctcccctctccccggggacctaaggaagactaagggccatggtttcggaggggtccgaatctgggtgaaaatcaccacctctggcatctgcttttgggaagagagtatgcctgtgctcgggcactttctccccttgaggggtggggaggagggagaaatcggaaccggaatctttgcgctttaagattagataggggcagaaggcacgtaacccattaaagggacgtgcaaaacatcactcccaccccaccccttaaaaagccaactccttgggaccgacgcctgactctcgcatgcgtccctccgcctcagtccccagtggcgcccgtcctcacagctccacgtgggccagcctcctgacactgctcagcgctctctttatttatcttggactccaaagtcgctctcctttgctccctccccacctccctgccacctctccgcgcctccctcccggcgttccttccaccccaccccccaccccccccaaccccccaagtccggagtcccggcgaatctatgctaattatttcaaacctgcgcctggtccccagcgcagtctcaatgcccccggccccgcccgccctgtccctccagcccggcgctttcttccctcccgacgcagcctcgatggctcctcatttcaatagcctggccccggagccgagccccctccccggcgctgcctccgtcagccgtgggacagacgttagggtattcattaactgagagccgaggaataacggcattattccccccagagagggcaccctgcccccgcgactatctgaggcttcattgtaaaaggattaaaagttaaagacctccatcttatgattctttcatttaatcttcctggcgcctgggagacatgctcgatggatgatggcttttaaaatattcctaatgtcggctaccttaagactccaagctgggcaaacaaacgtaatttatttccagaagaaaggggatattgagatgtttaagtttatgaactgccgtccccatgtatatttgttaagttctgacaaatacccaaataacgttaaaatcagccattcatcacttatgaatttatgcaaaactttctgtgccccgggccaatatttttttagacagagtttcacttgcgaggggcggaggtggtggggagtggggaagaggaggggtcttatgcgaggggggcgaaagcaagaattttcatgcctggtaaacacgcgaattatgcgaagagagttattcccagctgggcgggcagccaaaactcggagagcgcgccgaggccagcgcccccacccccacgttggcaatgtcattggattacaatgcgaggtcttcccctccgcgacgccccctcctccctccgcgggcccgcccgcccgcgcccctcctccccacccctgcccacttggaaaacccgcccgcagccggcgagcttctcggctttcagagcaggagccggtgtgagctgggaggacgcgggttgcagacgtgaccggcgacagacagaccaccggatgcacagaaccagagagcaggcccgaagccgctgcggccgcgggagaggacccagcgggacccaggcagtcccagaagctaacgaaggaagtgctggtcctggaacattgtgcctaatgcgcagctggttacctctccattattattaatgccgataatactaataatagcatcaatgcggaaaggaggagagagctctgggtaaagaggcaagaaaactgtcctcttcggtcatccagtgcctatctcctgtaaggaggacaattgatctagtgacttctgcggttctgacacctgtgtctatgaatttatgcggctgctggggggctgtgtctccccagagtggagatttataactattacagatacatacgtgtcaactttttcaaatactggaagagaatggcaaggtttccaccaacccattcctcccactagaatttcgagaattcactcatcaacctcctatttgcaagcctcccctttattctttccttccactttcaatgtccccccccaccacacacacacacacaccgcacacaatctctctctctctctctgcacacaagagcaaactgaggcccaatgaccaaactgagagggaaagccagccctctcaatggagggtcctctggcccccagagtctgggaacgggatttagttctctgttgagatggagaaggccaggggtccattatcagtcttgcttctgagactccctgggaaagggggttgaagtttggtggcagctgcaagaagaagctggctgcgtattaagagctcttagctgtgctcgatggggactacagggggagggcccagcccatattggtattttgaagggggtgattcatcctttttctttaatgctcttggaatgtcagagctagaggggagcttggattccaatgtccaccgctcaatttaccgatgagaagactaagacctcagcagccacttgctgaagatcacacagattaatacagttgagattggctaggtggtgcctctctagtgagcctcatcatgattctctttttcttgttctcttttttctttgcttttttttttaattgatgggagcgagttctccctaaagttgacattataacaactgatcatcagcaagcggatcaatccttctgttgtacctgtttagcaggtgtttattaatggtttgtgatgtgccaagcggtgtgttaggcctttacactcattttcaactaaggcctctagtgtccaaataaggaaactgaagctcagagagtttaagcatcttccccaaagcctcatagtaagtgacacggttacagttcaaaatccaagctgacaccaccaaagcctatgcttcttccaaataatcttccttcctttaaggacttgaacaccgatcttgggagacaaaatgcatgccacgctgtgagctggtaagtctcaagtcaagttctgtaggggttcatgcctggtaagccacacaaaaaaatatttgcacaccctgttatgtgccagcaccccccacttcctcccccacacccccacaaggaagttgcaatgcaatagaggagataagaaatgaagaactggtggctgggtgcagtggcacacacctgcaatctcagcaatttgggaggccgaggcaggaggattgcttgaggccagagttcaaaatcagcctgggcaacttcatgtctacaaaaaatttaaaaactagccagggatggtggcacattcctgtagtcctagctactcaggagactgaagcaggaggatctcttgagtccaggaattcaaggctgcagtgagctgtgacctgactgtgctccagcctgggcaacagagtgaggccctgtctcttaaaaaaataaataaataaataaataagaactgggtaagagataaaagaggaggtaaagcatcaaataaacctgggccggaaaaaggagggctcacagccagagaaggcatttgacagaagcctcaaagaacagactgaatgtcaacccactgaagtgaggatggaggaggagatgtgaggatggagaaagcagtatatattaatatcagtgaagacatggtgctggaaaagtatgtgtgtgtttgggaaatagctcaaacaaactttagcataggatggatccatgctgagaagagcaagcaataagatttgaaaagcaggttgaagccagattatggaggatgttgaatgccaactaagggaatagtgacaggaagccattgagagttcttaaatagggcagggacccccattagggcactgctgcaaaatgaattatttattcactcaataaatatttttgagcactgttctggttatccattggtgtataacgtgctaccccaaaatgaataatctttaaaaaccattttattttattcatgattctgtgagtgagcaatttgggaagggatctgctgggcagttcatctcttatactcattatgtcagctgagagctggaggatccacttccaaaatggcttctagcacccagctgccaactaggagctcagaaggaatattggccagagcctctacaagggacttctccatgcggcttggattttcccacagtctggtggctcaggctaattggacctacatggtagctcatggccctgagagaaagtgttccaagaggcctgaagggaagctgcagggcttcttgtgacatagactccaaaagtcccaaaatattgtttccacttcagcctactggttaagcaagtctctaagaccagcccagattcaagaggaaggaaattagacatcacctctcaatgggaggagtagcaaataattggcacccatctttaatctatcttatggtgggcacttctgaagtccaggttctatactgtatgtctaggacacacaaatgaaacgatgcagtgattttccatttaaatttggtgccggtgtcctgaatagattggagatgggaatagtggctgccaggagattagttaaggagagccttgctatggtcaagaaagagtcaaggccagacgtggtggctcatgcctgcaatcccagcactttgggaggccgaggcgggtggatcacttgaggtcaggagttccagaccagcctggccaacatgatgaaaccccgtctctactaaaaatacaaaaaaaaaaaaaaattacctgggagtggtagtgcacacctgtaatcccagctactcggggggctgagatgggagaatcacttgaacccaggaggcaaaggttgcagtgagccgagatcgcgccactgcactccagcctaggtgacagagtgagatcctgtctcaaaaaaaaaaagagtcaaataagagtctatacctgaggagcatcaataccaacaaatacagagatcatttctcagaagactagagaggacctggtcactgactgggtgcgaggctgaggaacagattttaaaggacccctgatgcttcaggcctgcaatggaccacgcacagaagaggaatttcagatgtaggagttctgtccctcctttacccccaacccacacatacacaggacattgagactaagagatagctagaccctcgtgtggccattcatataagtccctgacatagtgcttgacatagtaagtcttcactaaatactaggtaaagaaatatggactgatttgggggtccacagggtgtcatgctaggtcattgagcaaaggatgaggtgggaagactttctggattaaaactatataaaaacgaacaaacaaacaaacaaaactattagaaaggtaaaactccagactggaagtccacgtaagagattgcatctaatcctgaaggacagataatcaggaagaagagataaaaggacaaaactgacagatgatttaaaggaaaacagaagttggatccagcttgcatttttgtatgaagcaataatttgctgcagctgaaaagaaatggccccctttgaatagggtgtgccctctttgttttgccacagcctccacctctctctattgcatacttcagtcattatatcacctaccatgacctttgtagacatttgcaattgggacttctggattagatatagtgaggagactgcaaatttttattcttttgaaataagagaaaagggggccccaaaagaaaccatatacagaattttaaaaatagattcaaattttgagggaaagaggatagaatcacaatatttaagctggggtgtccttaaagttctttacccattaatttgactgcagaaactaaggcttatcaaggccaattgacttgtctcagttttatttactttggaacagaaatggcaccagaagcaatgtttccagattttcagttcaaccctccctttatagttgttataggtttaaacagcattagaatttaaaaagcactttcacatgcataattttatgtaaaatgaggcatgagaactcccaaggataggaaataggcttgtctaatatccccagagcctagcacagggcctggcccatagcagcacttaacaaacattaactgcaggaataaatgcacataggttcattttacagataagaaaactgaagctcagagaagttcagttaaggacagatggtcacagagttcattcctgttgctggaggcaggaggagctggtgccatcagcactgggagatccagcagctgctatttctctatggtcagggttgagctccagaaaccaaccacacatctgcagattgcccagtaagtctatgcaacaaaaggaagatggtgggagtctacacctgccaaacaaaacaggccttatagtcgctgtttttgtcagcgtcttcccacccagtgttgtaaaggactcctgactggtgttcaacttattcaattgaggggaaaaaaattgttaagcaaggagacctcccctcattttgcagacgcagagacttgcaaaacaggaagcctaagggactcgcccaagatcaaacagctcgtcggtggtggagccaagattcagacagctctagctctagcactagcactctgctgggctgttgggagaggcagagggtttagtgctccctgagttcataatcccagccactctccctgattccctgctcaccccagctccaatccattctccacgctgtagcccgagtgaccttaagacacacatgtggtcttgtcactcccctgcttaaaacctctcaatggcttcccattgctttgagaataaaagccaggatccttaccaagttgaggccctctctcccctggctctgggctcagccttcttttcaggtcccctcacatgccaagttccccactgcttcagggcctttgcacatgccccaccttcagtctggggtaattcctctgccaccagctcccctaaatgtcaccctgtccttcagatcagtcttaggggaagcatatcgggtcccctctgatgcatgatctctcagctctctgtgctttttcttcataggccgtattatggtttgtagttggaatgcacaatttacaattatttgtgtgccttctctctccgaatacatggatcacctgtctccattgtactcattatgatatccctgatcactggtgctgtttggggcacatgtagacaatatatagagagagataaatgaatacactgtataaaagaaaaaatattaattaattaccttcctggtataagccaggttctatctggggctccaagcataccaagagttcagagtccagctgctgttaaatagtgatccagagggaatttaagaatgtgcccacatgtgaaatgcagggcagggagcagaagaccctaaagtgactatcagttctggggattacaggaactcccaggttactgaacccgaaaccccccgtctccttcaataggcggagagggagagctgagttgccagataaacccttttagccaatcaagaaccctcccagtcagagagagtccaagcttccccatcagaagctagatagcactgaatgatttcatagagaaaattctaagaagactccagggaatgggcagaagaatcacctgcccccacatctgaaatcctttaaaaatgggagaaattgccttatctgctatacagttaaaacttgatctttcctgcccagggaataataaaattaagcaatgactaactcacgtctaatgctttacagttgacaaaccactttcacatctgttatctctttcaaacccacacaacagctcatggctagaatttggattatcatttgaaagataaggaaactgagacatgaagagtaacttgcccgtgaggcaaaaacctttctgcggagagggagcttgataatatggaggaaaacaaaacagaacaccttggactttggagtgagaaccgcctgggtttgaatcctggctctattaactgtggaccttggttaaggcacctgatctcctgagactgtttctccatacctaaaatgggcataatgacacctatcttaccaggctattgggatgttctagtatcttccaaacgtgtagcccctgcccagccaatgatggtttcctcctctctcccaattccaaggcctgtgctgcgctcttctccatcggaatgtattgctacctttttttcaggtgacaaaggcttttaatttagctccagttatttttttggtggcggttgttgttgttgttgttcttttaaattataagacaaagaatgggtgaggatgggaaaaccaatgaccaaaggcaaagctgagagaaaagacaaaaagttaaatcaggatgggaggaaactgggaaaacagagagttggttttacttgagcaaaggcaggaatccagcctagggaaactagccctaatttgctctaaatctaaaaattcttcatttctagtgattggctctttactggaaatatgcagaagtgactccctcccagaaacagccttgactggtgtcattccagcctcacttcaagggcagagacctggttgtcagtgagatcatcacagccacagaggaccaagggccccaagagagtcaacatgcaatgacagcaatgcagtgccttaaaggacatctgtctacccatgactaccacagtggagaatgaggaaattgagacccatagaggaaaagtgacctagtcaatatcaaacctcaagttagagaccaagggtaatggagaaactttgatgagagtatgggctgctggtaactaacttgtggactcaagggcctcacaccctcaaggtcggacaacttccccaaaatgtcacattctgagacaggttaaccaagggcttgggcctctgctgctgtttcctcttcctttcaaaggcaagcaccatggataggcctgctctgcagctccaacccctggggtccccagggtcatgctcagtgcaattcttctttctggctggacacttggagcttgatgttccccagagttctggtcaggctcttcccatctctttgcctgaaaagaaactcagggccttccacagtgggagccatcaccactggatggccagcacccaaatctcacccccgaggcagatgtctctcctgagttccacacttgcagagccaactgcctcctggacttcaccacatcaaatacgttttcaaagttgaatcctaaccctatccccaaaccttctgatctgttttcagttttcttattcttgagtaatggccccactgttcacccaggtatacagaccgaaaaaaataaaaaatctctggtctttcatccttgtcagcatccttttatcacaaacaaagtatccgccaatagctcctaaattgtctgtcagtccatcttccatcctcgccctcaggcctctgtcctcttttgccttggcctttgagcctgatagtccatgtcttcacctccagccttgccccagcttcaacattgccacttgagtggccatttccctaacacacactccaaactttcagtgtctccccttttctataaaaccctggctaagttccttagcatggcaccaaaaccctttacaatctatgaccccaatttacctaccactataatctgccactattttctgctccacccacccccaccaacaagccacaccaacttactcatggctgcccaaacttgccaaccctttgatgcttctgagcttttattcacactatttgctctccctgaaagacctcctgccccacccttgcttgccccatcaccccaaaccaggggagacctactcatacttcagggcccagcttcatggcacctcctcaacccttggccagggtggaattaatcaagcaatgctttcctcccacagtactggtcactaataataatacgaatagatatgaactgcccacatgtgatgagcactgtcctcggtactttatgtacattgtatcacttaaacttcaacagtaatcctatgtggtattactcttactatgtaatagattcacagagattgtgtgacttacccaaagactcctaattagttaatggcaaagccaggactcaaaaccaggattcaaaagccatgctctttccaaccttgaatactttttcccattacagtgtgtccagcacttataactttgcactacctgtgtatggaaccatatctggctacctctgggtttcaaagccctttgaggcagctactgtttttgattataatttgtaaccatattatccaaaatagtgcctgtagatagtaggcgtttaataaatgtgtggtaaatcaggaactcagtgactagatatgagaaggggctccagttttttcttttaaaattaaatccaaatacaatggtttgtttgtttcatgaacatcagttaatttcaactttaacttaaggagaccttttgaagacataggtaacgtggggttgttaaaagcagggactttgaagttggacctaagctctaggctctatcccatcccagctgtgtgactgataatattaattccattgtaagctctaaaaccctgaacaaacacaagccattgttattaataatacgtgcttctccaaagaggactcaagctgtttcctctgagacagagagggaaagtggaggcagataaccctggagatcattggactcttgtttggaaaagcctgtgaataccagggagggatgcctttccatagtcactactgtcccagaaggagcaggttcagcaaaagctggaataatgaggaattgtgacctatttgtacccagagaagctgggggtgaagtcatagaagaatagagccaaggggacatgagagcaaagtggttgccatttgtcccagtcattgcttcattacaggtaaggaaatcaagacccagagaggtgcacagacttgtctaaagtaacaaagctggttggcactggagctgggaccagattcaagtaacacccatggaatgcctgataatcatcctcccaatattaaagtcaatttcttatcttttttctttctttttttttttttttttttttagacagagtctcagtctgtcacccaggctggagtgcagtggtgcaatctcagctcactgcaacctccacctcctaggttcaagtaattcacatgcctcagccacccaagtagctgggattacacgcatgcaccaccacactcagctaattttttgtgtttttagtagaggttttcatcacgttggccaggctggtctcgaactcctgcctcaggtgatccacccacctcaacctcccaaagtgctgggattacaggtgtgagcaaccgcgcctggccttaaaatcactcttttaaaatgctctatatgattctcttctttcttggttcccaaatgaagcatttctttaaagaatgtgccgattagacctccactgtaccacaaatgtcagagagacatctgtcatctccaaagccctgaaagctgtgagaggagcccagaaggcattgaaagaaccagtactctgcaggttcctaggaccaacaccttctccttgcaggccagacggcagtttggctgtcaaagacaggatgttgtcactcctacccttaaacatttccaaggatacaaccttcctgaggctgggaaatcagtctagtttctgaatcaggccaacatgatgagtagaaagagcccatggtgtgtgggtgtgtgtgcacgcgcgtgcgtgtgtgtgtgtgttttgggacagcgtctcaccctgtcacccaggctggagtacagtggggcgatctcggctcactgcaatctctgcctcccaggttcaagtgattctcctgcctcagcttcccaagtagctgggattacaggtgcacacaaccactcccatctaacttttgtattttcagtagagacgaggtttcaccatgttggccaggctggtctcaaactcctgacctcaggtggtcctccctccttggcctcccaaagtgctggaattacaggtgtgagccaccatgcctgggattgaaataagagacatctagattgacagcccactcataacctagccatgatctcatcagtccttctcctccctgacagtggcaaaaccaaggtactgtgatactttcatccatctgttaagcacttaccccatggcaggtattgtatagtgtcaacaaatgagaaaccccctcctttccagctgtttgtccatgggcacaatcgataatagcaactatcatttattgggcacttatgatgtgtcgggcacttatgatgtgtcaggcactgagctaagcatgtctcaactcacccttcaccatgctggtggtggtgctaccaattacagatgaggaaactgagacacagcagagatcaaaggttacacagctagtgattggtagatttgggatgtactcaagcattctgacttcacagcctatacccttagcctccttaacctcctcatctatgcaatagcagtaacattatttatcttacaaggttactgcaaggataaaggcaggtaagaaatgtaagtgcctggcacaatgtctgccacatgtgggcacttaagaaatatattctctgtcccctgttggggctgggaccacgaataagaaacaagaaggggagagacagaggccaagtttctggggcctgttctgactatggagtatcgtataggggcggatcactaatatagtatctggaaatgctaatccacctttggtaatgccaatctaattgctaaaatatcaggcctcctcctcaatgaacacctttcctttttctctggttctcatacacaagtgtgcaagcatgcaggagcacacacgtggccacatcaatatacacactatagctttttttttcttctgctgctgtctttgcttccctgaatttggtatccatagcaacgcatcccagcagcaatgaagaggtgacacagttgctgtttccctcacacccctattttgctgatcaaggctgcccatctaacttaaaagtgttgctcagagggccgggctggccttgcccaaaggcaagaggacattttcccaaaagagaggggcaaaggtaaagaggatgtagaatctccacttaaacaaacaaacaaacgcaacaaaactctttctaggatggagacagagcaaaagaatcaaagcccttgaaggtgctacctgagtagctgggattacaggagttggccaccacgcctggctaatttttgtctttttagtagtgatggggtttcaccacgttggtcaggctcgtctcaaactcctggcctcaagtgatccacccaccttggccttttccatgcatgggtgccactgaggagctcttgccccagtagtatgctatgactaagggaaaccagctatttctagcatttttggctggtgggcttccctggataaaaaatctgagcccagtccctgtaaatctggaatcgtagaatccgctccatgcaccagctatcagatattgaccctcccagctcatgtggttccttcttatgtaagacaggtcagtaatagtcattctttttattttggtttcgtttcgtttggtttcaattcgtttggttttggtgtgtttgggtttctcattctgttgcccatgctggagtccagtggcttgacctaggctcattgtaacctccacccccaggttcaagtgattttcatgcctcagccacccaagtagctgggattacaggcctgcaccaccacgcctggctaaattttgtatttttagtacagatgggtttttgccatgttggccaggttggtctcaaactcctggcctcaagtaatccacctgcctcagcctcccaaattgctgggattacaggagggagccactgcacccagccaataatagccattccttacagttattctgagcatgtgggtgcacaaagcacattatacatagcatctcaattgatctcatcaaccaaaagagagccttattatcactgccatttttttgagatgaggaaactgagtatccaagtggtccaagattattcttcccagaaaataccaatcagctgttcacaacctcttcatctgatttcaaatctggtttcttgaccactgtgctacagtcaatcctgttccaaagccatcacttacatttaacaccatattacaatggggtaatattatgccagtgaaattgatgcaggaactatatcgtttagaatttgaggggaccttaaagattatgtaatgcagttatccttccttctccatttcacactggaggaagtcaagacttacatcatgcacacaacatagtagctacacaatacctatccattgaagtccaaagagggcaagcgatatgctcaagaccacacagctagtaagacggtgagattaaaactccagtttaagtgctggagccacagagatacatcagaaatggtccttgatcttaaggtggacaagtattgctatgtcaactgttggtccagcccaggagcttcaacaagttgaaggatgagtaagagtgagctgggcaaaatggggaggcagagaagaaaagaggcactcctgaaagggagactggcatgaccataggcatggagatctaaaatagattggtgtgtactgggaatgctgcacaattcaaggcccctgcagcatagaacaggagcctgagaatggtggacaaataaaaactagagtagaagtcaagggccatgcaatggagggccttgtaatccatgttcaggattttgactttacttgcaaggccactggaagttattaaagtgctctagttcatgggagaggactttcatgtagatcattgaagcgttcatgtgaagtcatgaaaaagctctgtatgtcattgtagagggtaaatcagcagcagggaagagacaaataagcaaaactcttcaatgcctgggttcaagattgggtggttctttatcatggaaggatttagatggagaggtagtaattgatgaaagaacttaggagctaaaattggcaggacttggttagactgacaggacttgattagatacagaagataaacagaagggaggagtcaaggatagctccaatgttctttccattgcataatgactactgtctggagcgttcccagtccaatacaaaggtatctaaatctgtataattatcttgaggctgcttggagaccacagacttgggacaaaaagaacagcctggtaccagtcaaacggctctgctaccaataggaaaagtgctgtcaggactgttatttaatttggggccttgattccctcatctgaaatagagagttggcctggaccatctctccagtgtcttctagccctattaccttcctaatgcaattgttatgaaaatcaaattcatttgttcatacagcattatccattaggcaccttccatgtgcctagctttgtgctagactctgggagttcaaaggcaaatagacccaaccccagctctcatggagagaagaagtgaagatacagacaaatatgcaattgcaacatgagctgcaggattagaaggtgttcagaagggctcttcgctcaggttggtggtagagtggatcgggaactgagaataaaagatctaaattgatattgaaggataaacagttggtctggcaaagagagaggagagatgttccagcagtaacaacattgtacaaaggtcaaaaagtaagagagtacaggatcaactcaggaaattgaaaataagaaccgtatgtgcaggcacgcagtaaacagcaaagtacttttttattattattgtcatcatgttcataaggtagaacctagtgaaatacaccaaagacaggacacacttcatttttctgatgaccaagttgtccaaaaccattggattctgaacttcttttctctggattgtgacgaagatacagagaaatcttttcactcactgattttttttccattctccatgatttttccttaaaagattagcagagatgtgtacagtatggtttaatcatcctaatgtctctagattctcaagcaaacaaacaaaacaatgctctctccattttacagatgaagatggttaaacacaaataagtccaaagtgggagagaaactaggatttgaaccccatctctctggctccaaggtcacctgcactttttcagaactcatatggactttctgattgcacttatcacagaaccacacccatcatcctcacagacttttgtggtagacgcactttccgaagacagaggtcccttttcatagattaccttcaaggtagtcagctacttaaatctccttagttaagccatcttcaaatcactttggctggaagataggatcagtttatgtctaagacggtttcctgtagacagcaaatcttatccataatgggtacatttcccaggtttaatcaaggaaggtgacatttcctgcctctagggttctggccttttaaccatttttgcattagtcaatgcttgcttagaatttggaattcaacttatttgtagggctacaccacatggtgggatgaaagtggactagatctggacccagaagattagggttagagccttccttgactttgccccttacatctgagacctgggggaaattcactccactgtgagcatgtctgggtccacacataccttagtttaaattgcagtgttgctcatgattagttctgtgactatgtgcaagttatgctttatctgagcctcagttcctcatccagaaaaaaatagggtcaatccttgtacccctcatgatgtgatactgctcaactgacatttattaaataaatgatatcagtcaacataaattgaatagctgcttaactgatattgattgaataaatgaaagcatttaaaagagttcccttccccctttctcttcctctctggcttactttccttatctgcaaacagggataaaaaatctctctcctatattcctcctcatgtgactgcactaattccatacagtcatgtttgcaaaagttcttgtgatgtttaagagtctgtggtgacctggccgggcatgggagctcatgcctgtaatcccagcactgtgggaggcctagacaggaggatcacttgagcccaggagttcaaggttgccgtgagctatgattgcaccactgcactccagcctgggagacagagtgagaccctgtctttaagcaaaaatgtctatgatggtctaagatagaatttacactacctaaggaatgacatatgttacttctctttcttacaagattcctacagagtaggtattatcattatttccagttcccagataaggaaaccagagctcagacagttaagtggctttcccaggttcaagatagtctgtgctggagcagagattagaagccagattgctctaactccaaatccaatattcttctcactatagcctctaatcccattgagtctagaggctacaatcctagtctctggagccaggctacctgcagtcctatttgggatctactgctgattagtgatatgtccctaggggagagttaaatatcatctctatgcctcagttttctcatttgtgaaaggaaagaaataataatgtccagttcatgggtataagactctttacctcactttcagtttcttcaactaaaaaaatgagaaaataacagtaattctactatgccagactagaggcaaggggtagaccctacttaatcttttttttttttttttttttttttttgagacggagtctcgctctgtcgcccaggctggagtgcagtggtgcgatctcggctcactacaagctctgcttcctgggttcacgacattctcctgcttcagcctcccgaggagctgggactacaggcgcccgccaccatgcctggctaattttttgtatttttagtagagatggggtttcaccgtgttagccaggatggtcttgatctcctgacctcaggtgatcctcccacatctgcctcccaaagtgctgggatttcagatgtgagccacagcgtccagcctttaaatgtcttttatgctttgactactactaagacttctgtgaagaatctaataataataataatctaataataatcatttcttgagtaccagccatatgcctaaaacttaaccctatgaagcaaggtttattattcctgttatgtagaagagaagattgagagtcacagaagttaatttgctctaataaataatttgcagaatgaatgaatgaatgaatgaacaaggtacgtcctcaaaaccagtgacgatctggagaacaaagcttttgtcttttaagatcttacccggcagaatctagtatagaattgattgcataatgacatcagacacagacttggacaaagttacagccaagatgtcaaatgagttttctgaggcctccatccagcagacacacatcatgagcagcctaagggagaacacatcaggccagatttgaatcttgccatttccaaatgcagaggctgagtgctaacagttctgtgagttccagatctgccaagtaacagcttgatttttcatctctttggggacacttgattccttggatgatctgatgagccagagctgaagtttattttcaagttgaaatctcaccactggtttctatttcttatgaaaattggattctcaaagatcagttccccttaacacctgtgattctcagttttccataagccagatttcaaaaaataaaatacggtcctcagagttcaatgactcttctcatactctttacaaatcttttgccttctctgccacttggcacaatatcaaacaagccaagggaaagaatgaaggggtgggcacagaagcttggggcactggggaaagccagcgttcttatttcaccccagtgctccacagacatttaatggaggtctatctggtaaggttgcagccattgtctcattttctggaagaggaaactgcagcttgaagaggcctgtcaacatgattaagatacggcccctaccctgaaagggcccccaattcaatagaagtgacagacatagaagccacaacctatgacccaataagagtgggtacaaagtactcaaggtgtgtggaggacagcacaattatcttaaaaaggaaggcctccctttgggaagcattttcaagtgcagtgaagtcatgcctgacaatgtcatttggctttgcctcaaatcagttttttcatgataatatgattatatgcgtcctgatttcttcaacaaatatgtaaaaagaccctgtgcttgaagattttgctgtgtgattttagactaatgatttcatacttttttgctttttgtttttttgggacagagtcttgctctgtttgcccaggctgagtacaacggtgtgatctcagcccactgcaacctccacctctcaggttcaagcaattaccttgccttagcctctcgagtagctgggattacaagtgcccaccaccacatctggctattttttgtattttcagtagagacgggatttcaccatgttggccaggctggtgtcgaactcctgacctcaggtgatctgcccgccttgcctcccaaagtgctgagattacaggcgtgagccacttcgccccaccgatttcatatgtttaagtttcagtctctttatcagcagaataggaataatatcataatccttattaggattattcaaataattattatttctctagctaccgccatacagttactgtggaactctaatggtgaaatttgcatctaaaagcactgaatcagcagcaatgtcctatttatttgtgaaggattgtattgttgccactgttgaagacatccctttatttctgagtgactagacattctatattgattcttcagtaaattaaatcttgtcccaaatactgatcacaccaagaaggtctccttttccttcacatgctttggataaacagaatttctcaaccttgacactcttgacattttgggccagacaattgtttgttggaaggcaaggagcaggggctgtcctgtatcttgcagggtgtttagcagaattcctggcctctaactcctagatgcccatacccaccccttagttgtaacagctacaatgtttctggacattgctacatgtccatgggattggaatgcaaaattgcaaaattaccttgttgaggatcacatcaggatcacaacctacccgtaggaggtatgccgggctggggtttctgctcacatttcacagatgaaaaaacctgagacctagaacaggaaggaatccatccaagttcacaaaagggcttgagaaacaagagtcccaacttggctttccagaacacctatgtatagaactgcagtgccctctgctaaggacctgaagggaaggagtaagtcagagggaccaaagactggccctgctctttcccagtcctgcctgaaaccctcccagccccctctccaccattgagtggcagccccccaggaatgcctgctcctcttcctctccctccctctgtcctaaccttgctccttccctgtgctttgggagggggctgcccactgaatgctggaatgggcgtggaaccaccatgcaggaaggacaacaaatgacagtgaggataaagcccagacttagccctctccaactttccaacttcagggggatatgctgtcaccaagaagcaaacatttgggggaaaaaaaatcctcaaaggagattcctgtgttgccatgtaaggaaaggtcttggccagctctggtcaacctgggagagttggggtgggggtgagcacagagaagagtattgcggttcactcctaatctctgcccccagatctccccactccccctttgcatctttcttggaagggcccctcagaatccaccaaaataacccctccctcctccttcacctccctgtcccattcgccttggctgtcccccctgcagaaggccggcatgcagcctggtgcacgggttaggggtgtgtaacattttgtctgaataggcccctatgttcccataatttatagtggtaagtaatcttatttgcaaagcaagcccttacagttataaaaaacaagttaattgacttgcataaaaatcaaacatgtaaaagttttccatcttaacacaaacagcacactgagcccatttgtacaatagctatgatgcagtgcggcccgcgtctggactacctaggacccggcctctttcataacccaaaatggaatcttaaaccctgacaaggccacataccaatgggagttactgaatttagagtcagtcactcaactaattatacgacgttttattttttttcttgtgtcaataaacaaacttgggtctgacttctgacactcagacctagaagccaattaagaggcgttcccaatatattacagggtctacaaacaaggatggcttttcttggaaaagtgaacatcatgtttcttttaatgtgtgtgaaaatatatgagtttcttaatcactggcaacttagatggagtccaagacagggaaatcactgactcctgactctggaatgaacaggggctagattcttgatggggtttttgcgatgggattctctggtgagtgactgcagggaagacagcattcaggtgtggcatgacagagttggtggccagaggctgcttcagaaccccaagaaaggcagggaagaagcttagtggtggcagggtcttctgcagaaaacaatgagacaataccctagtgacgtggagggaaaatggtaaacctgcagaggcatctgttgcaaagggtgtcttacagtgccactcaattatccccaaaccaagagcccatttcacggtaaggggaagggggaggaaaattaatatttatcaagttccaatgatgtgctgggtgcctttgttttctgtatcctattcaagcctcaggtgatctgccaaaaagatataattgttcctgttatacagatgagaaaatggaagcctagagaagtggaatgacttggtcaaggccactcagcaagttcatggcagagccaaggtcagggctcattctattcagtcctgttccttgcacattgctctggggggagcaggcatagtcatggctggagctcttagcaactcaggatcaggtgtgatctgatgtgtccactctttctggaaaatggctccacctacctatcaatatctattgaatccctactatgtgccaggcaccatgtgaggagctatacatcccaggacatgcaacactgtttcaggggagacagactagaaaatcaacaataataagaatttgatatatgttctgatggacgcattcagctggacggtgggggttaaagtggaggtgaggtcaggaaatacttctaagagtgagtgagctttcatctatgacttaaaatcccaaggtggacaagcagggaaagagcatccaggggcaaggaccagcatgggcaaaggcacgaagtgggagagcagagtgagcatggcccttcgggatcccttcatggctgggagagccagctcttggggacaggaggaagactcgggccaaggctaggcctaagaccaggagggctcactgagacaggcagggggacttaggggagtattgttttctgagaaagacattgctgcccatacttggggagggacagactgttgacaataatcaaacctgaactgaaaagataggatggcacccggtaccagggctcaggaccaatgcagcacagaaatggttaggagtagggtttctggagcaagtctgcctgcacctgaatgttggcttagtgtgaccctgggaaagagacatgacttctccatgcctcagtttctccccttcaaaataggataagaagagtacctagtacacaggtttgttgggagatctaagtaagcttatgcaagtaaaactcttggaacactttgtggcgtataataagagcctaatacatgtaagctgctgaagagttctcatttatctttccctccaccttataggcttttccaccttggacaagtctctaatcctcccagtaataggggatctgcgggctcttggttcaccataggtgctcaatgaataacagctgtcatcattgcttccaccatcattatcactatctctgaaataacaatgttttgccttcccaggggaacaagtgtcacagccaccatctcctcaccacgaactgtccggacaggctgacatgccacccaggcaggcaagacaaatggacttgccacctacacggagcacacgtgcacaccaggggcacgtagcccaactcgttagcacaacagggctcccttctttttggcactgcttctctgctctgtatgtgctttgctcagagtggaggtccccgttatttatgtttggaaaatgcattcagggcagttcccagaagcacttacagagctcttatttaattgctactttataaactcactgctccgaagagtgagggattgatggcccggcctggcacctggagtagccttgctgcaaatgcttttccgagaatggtctgggagccgtcctccaaggaggccaaggcccaatgcagccctggcctacgtccaactctggagggcactgtaggactcgtcaccctaatccccagctttgggatggcagcggttgccagtgtggtcacacatacacacacatacacacacacagacacacacaagaagacccctcatcagttcaagaccaagaatgtgcaggggtaggagaggcctgtcactcaccgttcaccctcccttgccagagacctgcaaaaccccagccatgaggacatcccaggccccagatctgggcagggtggggacacttttttcaggtcccaccaagcccatctcccatttgcctcatgcttatgcgttggggtccagcaggactgggctggtgtccccagctctcccatgttcagagcaagttatttaatctcactgagccttggttttctcacttataaaatgtggtttatagattccatttctcagcatcattgagggaatgaaatgaaattattatggtgccattcctggcatgtagaagtagaagatcaataaatgttatttattggatttctacagccacagaaataaaggatcaagtatctttcttgaaggtctgagattcatcaaggctaaacctcccatccagataaaatatgggacttcataatgatcccttttatttatgcagtcactgtatgtcatactatcatgctttatggttcccaaaaagcattttacaagccttgtctcaaatgaccttcactagccatcagggttttgattatgcacctcattttacagatgaggatctaaggcatggatcctactggtcaatcaaccaatttctgcctccaaatcttgcttgcattcctttgcaccacattacctagcccactctcaggtagaccaaggcccatttgtgcctccaagatggctctcagtgatccccccttctgggttcatatgctagtacagtcttctcccatagcgaagaggacagacctgaatagccaaaaggatattgtggaagtgacagcatgtgacctccaaggcgagatcataacagacatcgctacttctaccttgctctctcgatcactccccatgggggaagcctgttggtacgacactcaagtagccctatggagaggttcttgtggtgagacactgaggctttctgcctaacaccaaaataaatttgccagccacaggaccgagccatcttggaagcagactctccagccaaaaaccaaaacttccacctaatcctgactacaacctcacaagagatccccaagctaaaaccatccaactcttacatacctacctacttgcatcctacacaatacatgcatttatttcagactacaccagtgctataatttgttttgttttgttttttgagacagattctcgctctgtcacccaggctggagtgcagtgtcatgatctcagctcactgcaacctccacctcccaggttcaagtgattctcatggctcagcctcccaagtagctgggattacaggcatgtgccaccacacccagttaatttttgtatttttagtagagatggtgtttcatcatggtggccaggctggtctcaaactcctggcctcaagtgatccacccgcctcggcctcccaaagtgctgggattacaggcatgagccactgtgcccggcccaatactgtaattattatacatatttactcttttgttggatacttttattctaccatttttctgtagggtgtgtttgttcactttccagataaaggcaacactatcacttctgtgtgtgtgtagccccctcaaaggaggattctaataaccagccttttcaaaaagcaagtggttagtgtatattttaacatttcaagaccaacacttcttgatctttggcttgcttttcacctcccctgtccatgtcttcagctcagacccgaatttttccccactggactatagcaacagcttcctagctggtttcctgacttccagttgcacctttctgtttcttccacgttagtgtcatgcaaataccatctcatttttttaaaacatctgctttaaaaacccagtcactccacagaaggaagccaagctctacagcatgccttacaagacttcctgatgggcctccactctttgtttctccccactgaattgctcctagatccccaagtgcatcctggcattcttgcctttgtgctttggcactaactgtgctttctctcaaggagcccatctctgccttgtccacctggcaaaattctattcatccttcaaaacccacctcagtcatgactgtcttgaaatcttccccatatctccaggcagagttaggtcccctctgttctcttggttgtatctctctgataacgcccagcactttgttagaattatacactctcccctgctagactgggagctcctagagttctgtttatttttgttctctcggcatctagttcaatggcttggcacataatagctgatcaatgaaaatgtattgaataagaaaggttttgtggtggggcttggggaggtaattttcattcattgagccagcatatgtacagctcactggcgtggtgttacgcgtacaggaggcttgccataaatgttaaggctggtgcttttttaccttcaccgaatgcaccaaggggcaggctttgtttgtttagtttaattgtggccctatggcttttttttttttttgtgacagagtcttgctctgtcacccaggctggagtgcagtggtgcaatctcatctcactgcaacatctgcctcccaagttcaagcaattctcccacctcagcctcctgagtagctggaattacaggcatgcaccaccacacccagctaattttttgtattttaatagagatggggtttcatgatgtagcccaggctggtcttgaactcctgagctcaggcaatccaccctcctcggcctcccaaagtgctgggattacaggcatgagccaccatgcccagccctatggcttcttctttgagcactcccagcagttcacaagagggtctgattttccacttgctttaaactctgcctgaactctgtgggctgttgatcctccatagcttccatccctgccaggtctcctggaatctttgtgtttttcttttataaacgctaccaatgggttttataaggtcacgtagcatttccctttcctatcttcagttcatggaatctcactgcattcattcattcattcattcattcattcattcatttgctcattattactatgggagttagagtttgatatataccataaagcctaactgccagggttcaaatcctgtcaagttctgtaccttgggcaagtgacttaacttctctgtgccctcagctgccacatctataaagtggggatataacagtgtctatgccacaaggctgttgtgaggattctaagagatagtattgagaaaaagcaagaagagctcaagaaatattagtgtttattcattcagcaaacatttctttagtacttatttgggccagaccttgttagatgtgaaagagaataagacaagtttcctgcacgctggagtccacagatcagtgagaaagacagggaaagacacataattacaaatgccgttgaaataccaaaggaaggcatgttctcagtggttactggcagcaaagaggaaggagtaaatacctttgttgatgagggagtcagaaatgcattattgaaaaagtgacagctccaggtgcacacaccagtgagagtggaaacatagctgcagactcagatggccttcaatggtatgccactcagggaacaggcacttggagaaactgaagcacttgaggctctgccatccttacacttgcatttaagaaagctcactctgtgaccagcttagtggccactgcagtcatccaggcaagatgtgatgaactaagataaggaaaaagaaggaacaaacttgaaagacatttagagcagaaggttggcatactttacctgtaaaaggccagataataagtatttcagattttgcagaccaaacaacctgccgcaactcctcaactcctctgttgcaaaagcagccatagacaatttgcaaacaaatgagcgtggctgtgttccaataaaactttatattacaaaaggaggctgcaggccagattggacccacaagccagagtttgccagctcctgatttgaaggcaaatggacaggaatccacatccatcctggaatgtagggaaagtgtaggaggagggccagggtggaggatttcaagaacctcaagtggtcaccaggtccagcactctgttgctatggctaatggctaaactatgttcattcataatacagaatcctatacaactatctcgaatggtcaccaggtccagcacttcttccttgccagaaggcctagcagtattccacatcaagttatgttcctcaaaaatgtagagattcagattcaacaaactcctctgtgttggaaagttttttttctacagctgttgatgccccacaggactcacgatcctgctcccatctttggagagattggagagcagttgtgagacattgacccagggtgtaaccttacagattgcccagcaccccatttccaacacagaccagctccaggcctataggagaagtcagagcaaccacttcccagctgagctacacagcagggaaaaagctggctcttaaggcagcacacacacttcagcagcctgtctggatttatgcaataacagactgctggaaaactgcatgtgactttaatttggggaagtcgtaagtaccaagaaagctggctatttaaagaaatcatgcagataattctaatgtaaagtgtttcccattatatccttctgcactgtttgtaggaacatcaattggtttgaaacttttgaaaggtgctttggttgtagctttcatagttttaaaacatccctttacccagcattgccacctctagaaatgtatcccctggaaatactggaaagcacatatgagctaggttatgtttttggtagcattcactgcaagagcaagattaaaatttaaatgctcatcagtagggaaatggctaaactacggttcactcatagtacagaatactacacaacaattaaaagtttgtgatagactcgtaggaattgacacaaattgttctgattcattgtgtaaaaaacaaaaaagcaagtcacagttcattaaaagtgattttagttttgaaaaataactacgtaagtacctgcgtgaatgtatgcaatgcttagcaaggccaggactggggtgaggcaataaggacacccagggagcaaaatttaaggaggccctcattctcaggcttatggaagtatcaactctgccctgcacaggcgagagagtgagggcctccttaaattttgtgcccaaggtgcctcacttgcctcaccttaatctggcccttacacagaaaaatgttttgataacacaggttatcaatggagagaagtgttgaaagaatggcaggtagaaatcttcactttacggcgttttgtaatgttcaatttttaaataaaaataagtgaattcattaggttattaacaaagccgaatttcattttaaaaatccaccatcaatttatctcataaatgtagactgcataagttgagtattttctaaaatacatgtctgtatattaccctaataatagctaacattaatttattaagtgcgaatgtgcctggtactttcatgatactggatatcatgaccacagtcaccaaaaatggtggcttagccaagtaggagttgttttttctcatgtagtaagaagtctggaggtaaaaccagtgacagctagtgtggcagccccagtatgccatcagcgatgctattaattagtcagctttcccagctgtgctgccataaggaataaccccaaatctcaaaggtctctttgctcccattaaatgcccttcacaagtcagctgcagttctgcccctattatcttctttctgaggtccaagcagaaggagcagcccctctctgggacttgcggcctcatgtcaaaggaaaggtaaaatcatgggatggcactgaacttcttctcaagcagggcatagtcacttctgctcacaacccactggctaatgcaagacacacggccatgccggattgaatggcatgggagtgctctcctctcccgtgaagtggcaggagccggggtcctacagaaaggcaccatgaatatgttttgaacaaatcattcaatctaccaatagggaccaaggcaccattgtcttctatttctagcatgtgccccttgtcctcctgggcaccagactgaagctcaaccttctggcatttcacttgaacagtaagaaaaatgaaagataaacagagacatgtatacatcagctgacactaccctctttcacaattgttttcaaaccttcacccgtgacttaagggataacaggtaggtaacagtacatgccacatacacatgatcatggttaatcttcacaaccaccaaggatgtgatgtttgctccatttcacagatgaacgaactgaggcaagagagtaaatggcacatccaagatcacacagctgttaagtgggtggagctggagtttctcatccagatgtgtctgtctccacgccctctctgctgcctttccagtgactggaagagatcaaccgtttgattggcttatcagccctcaattgtttctacttaaatgcacatgggtgtacatgtgtgcatgtgttcgagacagatctcagccacagttaatgctggatctcagtctcaatactggattcccaaaacatgaccacatcctctaagctacctctgtccacatcaggtggcatgtccgttagtttcagcataagccagaactaaaaactagcccaaaagaaaaccagtgatattaatgatagagcaggcaaagaggtgcagaggtggagcagaaagtgctctgggccagatgcggtggctcacgcctgtaatcccagcactttgggaggccgaggcaggaagatcacctgaggtcaggagtttgagaccagcctggccagcatggtgaaaccctgtctttactaaaaatacacacaccaaaaaaattagccaggcatggtggcacgcacctgtaatcccagctacatgggaggctgaggcagaattgcttgaacctgggaggcagaggttgcagtgagccgagatcgcgccactgcactctagcctgtgcaatagtgtgagactccgtctcaaaaaaaaaaaaaaaaaagaaagaaaaagaaaagaaagaaagtgctctgggtcagagggagaacacctgagtttgactcccagctctgcctcacaccagttatttaaaaataaatttaggcatatgtctacatctctccttggtatttctatctgtgcaaagggagctataatgcctacctcaaagctttgccaaaaagattcagtgaaataatgcaagtacaattatctagcacaggtaagctctctccagaagttagttttcttccctactgagacttcatcaaaatgtcttgtaaatgaaattccactcctccttcaatgtgcatagtcatcccagagcagctctgtcttgatttcccatagattatcagttggtagaagcactcaacattacagttttgccagtccaagaatatagccgactggatcaagttttcctaagagattccagaaaaaaaaaaaaaaaaaaaaaaagacaagactatcatgaacatctttgtatgatctgatgctttggtctcattactattcggggggaatccactctaccactctctccattcattccataaatgtacatcaaaagtccctttcaagagacatcgtgaatactgaagaaagccctccaaggagacctgtaaacagcagagcatgttgggagctatgtaagcatttgatgtatctggagtataaattttgtctaagcttggggtctgttttgaaggctgacttgtgtacagagcacttgtctaggtgccagtgaaataccaaggagcctgggccctcaagtgcccacagtcttttgaaggagagattgtgatgtgcgagcagagatataaatgcatttgttaggcctggcgcggtggctcacgcttgtaatcccagcactctgggaggccgaagtgggcagatcacgaggtcaggagttcaagaatagcctagccaacatggtaaaaccccatctctaccatgaatacaaaaattagccaggcatggtggcgtgcacctgtagtctcagctacttgggaggctgaggcagaagaaacgcttgaaccctggaggtggaggctgcagtgagccaagatcgtgccactgcactccagcctgggtgacagagtaagactctgtctcaaaaaaaaaagtgtatgtgtttgctatccctgtactgagaaacgaattaggtgggaaaattcaatatactgtggctggaatgagatggggaggagtgggaggcagaggtagaggcagaagagaacctcccattgctttattgatgatgctggaggctttagtgcatgttagggaggggagtgagtcttcaggaaccattccatttgccatctttggtggcatcttgataatattttggtgattacctccccttcttggaaacagttgaatctcccagtgatttccataaaaggttcaggtgagtgagacactgatcccctctgtcctggttggggaggcagtgtttagcagtcacttatgaccagaagtagccttacgataaggaagaacaacttatcctttcactccatcatgtcttataagcgtagtatcctttgcatgtcagaatacaaaaacagttgagaaaaaaggcaaccaatccctgaaggactatttatcaaggcatcctgacctcaatggtcgacagggagggaacccgatcaaggatagaacccgatcaaggtcaacagaaaattcccttactagaacttgattcatgagcagtgtccgggactaagaacattttctccagtggcagcacctggatgaggctgctgaggagttcctgctgctgacaccctctgaagctcctgtctggccttgtcttttccaaacctaagtttgtcacctcttctcttataagctccctttaatgtctccaataaattctctttttcatttaagttaacccatcagtatctgctgcttacaaccaaggaacgctagccaattctgtggttgctgtgtggcatgatgcatggtagtgtgtgtgtgtgtgtgtgtgtgtgtgtgtgtgtgtgtgtgtttgtgttttgtgtaacttaaggtcccaaacacccttgtacctgtgaaagctgaagcccttctttgccttctcactctcatctccattctgccttcccagtttctaaaccttcccctaaagtcctcgggggccagaagatggggtgggaagcagctataaaacctgacccacctctcagaggtgtgctggcaattatagggctggtgactgagcactggggaaggtaggagcacgacccacgagaggaggggaaagcagaaatacgtttctggggcccgggggctgtggggtctgtgctacatgtaagtacaaatctcacggaacgatcctaagttggtctgccctttagggtgggagggaactttttcttttccaccagggtctgagtccacccctcttggctgccatggtgggaagtttggaaggagtttccacctgtctttaaagaagccacttagctccagacaaccaggggtgggccaccagggtgatatacagagatgagcaatatagctggcatttactattgaaaacacataggagcaaatatttggctaagtgtttatttgctagtggaactttttaatggttgaatggagtccaagtgtcagcgtggggattttgatttaaaacagactgaagaagtgtttctccacagttgtaagcttggagagtttcgtttctttggctcttggaatccgcagtgggctgtgttcctcaattccagacagcctcatggggagccccaccccggtgggctcttcctgcctctgcagccagcaaggcaagggcctcgtgtcccttcatcaaaactggatcccagcccccttcaggcccagtgcagagcttggagcgataagaaacatcctctatgcctctgggtgtgttctgttgcagagcagccactgggggcagctagctctgagcatcactctggtgatgaccaaagctctgcagatccggactcatccatctgtcttgccttctccctttcttacttgttttttttctctccatgtgatgtttagtgcttgtgaggtgcatgtctcttgcttttaactctgagcagctgggggcagggaagggtgagactgtcctttgataaggtgtctcctgaccgcacatttctctcccaggaataaaacagtccagcatctcctgggtctgagcagctggggtcagggaagactgagactgtcctttgccaagggtttcccgactacacatcttctctaccgggaagaaaacaatccagcatctcctggatccctaccatgtgccaggctgcatgcagggcacttcctcattcctcatcttggttcactcctacagtaaatgagattcatctccattttacagaggagaaaactgaggcttaaagatgagccagggttggtctgaagccatatagttggaaggtggcagaataagacttgagcatggattggttggactctaaagtctacactcttgaccgggtgcagtggctcacacctgtaattccagcactttgggaggccgaggcaggcagatcacctgaggtcaggagttccagaccagcctggccaacacggtgaaaacctgtctgtactaaaaatacaaaaaatagctgggtgtggtggtgggcgcctgtaatcccagctactggggaggctgaggcaggagaattgcttgaaccaaggaggcagaggttgcagtgagccgagatcacgccactgaactccagcctgggcagcaagagcgagaccctgtctcaaaaaaataataataataaagtctatactcttttttgctcccttctcttgcattttctggctttatgggccattatgctgacaaggactcaaggcctgtgaacatcaaagaagacaagcaggggctcatctattaaaacctgtggttcttaggaaggatggccgtccacagctcgggcagagcagagcccattctgaactgctggcttcctctatagcaggatccaaaattccaagacacttgttgggcacaatcagagatcagctgctattgtcatcccctcctcaaattcattctgctcaagaaaatgggcagaggaaatagcagagaggaaatagcttaggcccttgccctgttgtcctctggaaacattcctccctccctcctatattcccacctgggcttctgaggctacagacctaggtacatgactgggaacaattacataccatctctgagcctctggggcctcctctgtaaaatggggataatcaggcctccaggagacaatctttttttttttttttttagatggagtctctctctgtcgcccaggctggagtgcagtggcatgatctcggctcactgcaacctctgcctcttgggttcaagcaattctccttgaatcgcctcagcctcccgagtagctgggattacaggtgcccaccaccacacccgggtaatttttgtatttttagtagagatgatgtttcaccgtgttggccaggctggtctcaaactcctgacctcatgtgatctgcctgccttggcctcccaaagtgctgggattacaggtgtgagccgcttgcgcctggccagaagcagcatgattaaataagagatattaaataagaggacaccttgcaagacagtgtaggcactaagcagtcactcaaaaaattgttacactcccccctgccccactgccatcaccacacacacacatgcacacacgcttccactgaatcacatacgggaatgccttcttcctaaaagggaaggaaaagtccacacctccggtctaaggcagctccccacactcacctgaaagactgaatagtcaaagccagtcctttaccccttgcaactctgcaaattgccagcaaacaaggctgctcatgataggtggccctggagtttggccagattcctgagagggagaaaaaacatcacattgaatgtccaggagacagtccccaaagagaaactgttgttactgagggacccctgccttgcctctgctggtctgacctgagtattgtggcaggaaacgcctctgcaatgaagcatcattaactgcagggacttcaattcctcacaacaggcctgctaggtgctgaggaatcatctcatcccccatctcacagaaggggaaactgaggctcagaaaaggtgagtaaccaagccaagttcacaaaacgattcgagatcaatactctattcccccaagactggggcagatccacagttccagaaaggaaagtttgataaagtacactgggtgtaggctgggcacagtggctcatgcctataatcccagcactttgggaggctgaggcgggcagatcacctgaggtcaggagttcaagaccagcctggccaacatggtgaaaccccatctacaaaatacaaaaattacttgggcgtactggtgcatgtcggtaatcccagctgctcggggggctgaggcagaataatcacttgaaccagggaggaggagattgcagtgagccaaatcacgccactgcactccagcctgggtgaaagagtgaaactctgtctcaaaaaacaaacaaacaaacagaaaagcatactgggtgttgcaaaataaggttatacctagcaaaaagaaaaataggtttcatttcaattatacaaattactaaaagttagacaaatgtggtattgaacatcagtgaaaagaaaattaagaaatctttctttagacagtggggataagtaatccaataggaattatgtaaaaactactctacttttttgtgaaaataagtctttcctcccttttctttcctctttcctccctgccccctccccacatacacacaattgttctgcagttgtttcaaatgagggagagaatgaaacaacacataattaaaaggatgacacattcatagtttttgtaatactattctctaattggagcatcactccaactttatgtcgtatgtagcttttgttttccatgtgaagagaaaacagagatacggtcattttcccagcatcatgtagcaacttagtatcggaaacttctagcccaagtggcctctaacactaaaagtccttgctttctccaccattcttctgcctccccttgagactcctaatggggctctggtcagactggcttctggattttcgatattcttagcagaaaaacatgtctggatgtataattacactgattatatgtatatgtacatatatatgcatatatgtgtgtatgcacacatatacacatctgtaatatatatttgtatatttaaatatgtatataatacatatacacatatgtaatatctgtttcaaaaatcttacatcttatacgtatgcctacaaatgtgagtgtataaaagacaactgtttggaaatgagaaggaggaaaaaggaaaagagaatgcagaagaggaagtgtgtgagggaggaagagaagaaaaagggggtagaaaagtaagaggaggagtcaaaagaaaaagagaggggtgggtgagtgaaagaattgccagaagaggaaatagagaaagtgaagatgaagacatctcttctcagcaaaataaatagccgtacccactctgaggccattaacttgccagaaattctcaggaggctccttgggcccaagaaagcaggttcagccagtgaggactcctcgaagccagttttgtctcaagagccacagactccgagacccttgttccatgtatgccagaaggtggagatgacttgggtgtggctgatggagaaggtgtgtactcagcccagttcaggaatgctggacagctgcctgctccgaccctcccttcctgaagctgttcagggcaccctccaacccaggcacctcatgtccaggtgtccaaatgtcatcagtttctccctgggcctggcctaaggggcttcttccccaccctctctgtatacccggagatgtagcctggcaacctcatcatgtctgtttccccatctgtagcttgggctttgggattactatcttggattgtgcagactgttataagagaataccatcaactgggtggcttaaacacagtagacatttacagatccaggatctaatttgggcccacttcctggtttctacacaaccaccttcttgctgtgtctacacatggtggaagggacaagggaactctctggggtctcttttacaagggcactaataccattcacgagggctccaatatcacggcctaatcacctgcccaaggccccatcttctcataccataacattggggattcattttctacatgaatttttggaggagacataaagattccatccatagcaagtatcctccacatcagaagtcatgaagagtaaatgaacgtgcagacacaacttggctctgagtcagtctcaatagctaccagcccttgttgttcttattattacctgggctgaatccacttcgtctggtttgcatagctatggctttctttcattatgcagcaaggttcctgggttgtcagtctcaagctgactgtgcactgaagactccaggtcttaagtctaaggaaaccagatatgggatttctggcatttgggggctgatgatgggggagaaagactgtattcacttagaggacatttattgcagacctactctgtgcacactcctatccacatgctcagcagtgccagtacaaacacgggacgcagtgaagcacccaacactccttccaaaacttttcttcctcctttctctttttaaaaaattacttatgtgtctctctgtctctctaaataaactgttagttccttgaggccagggactatgtcttgctcctttttacttcccacaacatgtggcacagaatagacacttaataaatatctggggatgggcaaggtggttcaagcctgtattcccagtacagtgcgaggccaaggtgggaggatcgcttgaggccaggagttcaacaccagcctgggcaacatagcaagcccttgtctctaaaaaaaaaaaaaacaaacaaacaaacaaacaaacaaaaaaaaaaactgagtgtgatggccctatggccccaactactcaggaagctgaggtaggaggatctctctcccttttcttttcttttttcttttctttttttttttttttaagacggagtttttgctctgttgcccaggctggagtgcaatggcatgatctcggctcactgcaacctctgcctcttggattcaagcgattctcttgcctcagcctcccgagtagctgggattataggggtcatctgccaccacgcctggctaacttttgtatttcttgggagagacgaggtttcaccatgttggccaggctggtctcgaactcttgatctcaggtgacccacccgccttggcctcccaaagtactggaattacaggtgtgagccaccgcgcccagccagtagaaggatctcttgagcccagaaagttgaggctgcagtgagccttgatggggccactgcactctagcctgggccacagaacaagaacctatcttgatagacagatgatagatagatagatagatagatagatagatagatagatagatagatacatagatagatcaatagatagatatctggaaaataagccaacaacaaaacaatgagagtcccaggtgcaggtctctagtggagacggggaagaccccccttatctcccatcaccatcagaaactgtgagcagcatcttagtcaagccaaaagaacttgaactgtggaggcaatcacactgtgatctctgagtcactgtgtgactgggacaagtgactccagatatatgagtttgtttcctcatctttcaaataaaaatatactccacagttgttggaagggggaaacaagagaattagatggtggcacttgaagcatagaagggctctatctagcacccttcttttctgtgcctttctctagataacaacagcacagagcccaactccttcaacaaactcaggaaactaaaagaacaccaggtcacccaagaagtaactagcttcatcctataagaaatataccctttcagaattttgcaggaacactttggggatatatggttttaagtcaatggcattttcataaaataataacagtattctggtggttgctttaaatatacattatatctcattgaatatttgtatcagttctatggagtaggtgtccatagaagaggggacagagttcttaaacactcacccaaatttgcacagctcatggtgaaagagccaggatttgaacattcccttgtggatctgtctgattctaaagtatattctctttctcctccaccccatggcctctgtccttgtatgttgaaataacttttcattctcatcaggagctgcagtcagaagatgaaggaatgaaaatggggcggggtagggtgtgtgggaaacggggccaagaatccctgtcctttctgaaatgagtagaaacattccaattccatttttactgtctattgcattgtaaaagcataaaggcttcagccaaacccctaaatatttaaagagtaacagaactccagattaaattaatatccacgttcaaacagtagctgcaatggggcaattgccaagttatttctaccctcatgagaaaggaaagaaagaaaatattagccgggaccttcgatctggagcgctgaaatcagatcccaacagggcaattctgtgctggggagctttagtacaatcaaatcttttcatgtttcaactcagcctactcctttctcactgggctcctggctaacagcttccctccagcgacgctgaattggtaccaaagtgatctggactgttttgacactaagcatcaattccacagacttggttttcatcgacaaatcaattattctagctcattacaaggccagagtgagttttcccatcagaatagaaactttcattcattctgcctttcatttgcccaggaaggaaaaacaaaggaaggcaggagggagctatgctcaagttattagagaatgcccacatgttttctccctgggacagaacccagagagatgaaatgtcactgagccaactatgcagagttccaggaggaggatttgggcttcctgagaacagcccaatctgtctgcatcatctccatctcagagccaccaagaggcacccctgatagaagcttcagaaaagcagagagagaggagcgggttggcttggcagaaggtgaaatcaagccacagaggaaagctgtgggataaaagctgtattagattccagcccttctcctgcaaggagacaatcgccccaacaccataagcagcccattagagagagcacccgctatgtaccgggtcccaagacaggcacatgcattgcaatcctcccaatgccttccactgggagtcagtataagaagcacagtccagcgcaacaaggaactgctctccacttattcccagtctatgacccggaagagaggacccctgggaaaaaagactgcgagcgacttcaatgtcaaggaaagttgctctccagagaaaccatttactttattttattttattttattttattttattttattttattattttattttatattttttgagacagagtatctctctttcacccaggctagagcatagtggcatgatctcggctcactgcaacctccacctcccagatgcaagcgattctccttgcctcagcctcccaagtagctgaaactgcaggcgtgcaccaccatgcccagctaatttttgtatatttagtagagatggggtttcaccatgttggccaggctggtcttgagctcctgacctcagatgatccacccacctcagcctcccaaagtgctgggattacaggcatgagccactgcacccagccaaagccatttttttaatagacaacatgaatcttctcaatgatgtcttctgctttattctggccaactaaaagctcagaaacaaatttactaaacaactttaataattgtgcaagattccaagttgtgcatgcctgtgtactaaccctgccttcgcttcatatttctgttcagcccttcttttctttttgccatggtttctttaatacactacattttttaaaagagctgtcttgtctcctgtctggaaagaaaagaagtataagggatcaaatcaatcttccattaaataaataaacaaaatgcaaactttggttttattctcacaaagcctgttgggacagtgatcattgtcctcaagttttggctgagaagattctggcacagagagcttaagtaacttacccaaagtcacacagctaataagggacatggccaagatgctaactcatgtttttctgacttaaaagcccatgctctttccactgccctgtgctgccagatattacccccaaagctttccctggcctcttgatctaggaggtctcaaggcctcaggacctttcagagtccaagagtcgagcatagaaccagccactgctcccatcttctcccctttcaccaggacaggacaagaggacacaggtgcaggctccaactccacatcccaatccagcccaagcctggccagtcttgagccagcatgtcaagggcttggcgccttcattccggagcccgcatgtgctgggaggaaagcctcatgcatgtgtttctgatttgcatgcatcccgcctggtctccacagagccattccaagtccgagaagctgtgggagccttttttatttttttacacacaccccccttctcttcctatccctctctctgacagcttttctctttgaatcagagaactagactctgccaagtgaaaatgtaactcaaacctcaaagggctcaacagcctctagaaactcgcaaggcacgatcaccctagagatgcagcgctctgctgtcgggactcccgctgggcgcagctctctgcctgccagagggtggggtgggggcagggggagactgcactaggatctgggtatttttagttgataatgattttaaatggccttgagccttcggcctagaggtaggagtgatttctccactttataggcaagtaagtgagactctgagagtttaagacccctttatttatttagcgcctactatgtgctgagtgctatacatacacatctctccatcctcacagtaatccaggagggcaggtggcagcttccaagggggtgccatcttcccttcatcacacagcttgtaaaaagtgaagtctgaactcaaacccaggactatgtgattccaaagaatttttttctaccgtgcagcagggcatccagagaaggtggggagcaccccaagagccgctagcagggaaatgggggcacgcacttaaaaccacccaatatttcccctgagcatcacaaacaagcaaaagattcaccaagccaagcctgttatctatctacttgccagggaggaattgagcattcccggcaggtgagtttatctggaaatggctttcccaaggaggtgagtcctaggctggactgtggaggatggggagcagcagccactgagggcaagcggctaaagtgagcagtatttgtctttgagacccctttcccgagtcaccaccaccaccgctgccaccaagactggctacatcatttcctggcataatgccaaatgaaaatgtggggcctcatgttcaaaaactattctattcaggatggtgacaggagaacattaaccaagcacagagccctgtgtagctgctcaggaggatgcccgtgaagcaggccctcggtgactccctccatatccacttcagagcctaggagccaccttgcagatcatccagtcccagaagcccagagggactgcacaaggcttaggagctcataggtggtctggcagggaccatccccaacatacctgtgtccccatctagggctctctccaaatatgccattgcctacctaatctgatctcaagcaggcttgtaaatacctgttgatttaattccattggggaacaaaaagtgatattcattcacaaccaagtgtgaataatcagtaccagtttaaactgtgaccctcccacagggattttcattttcacagagatcaaagctttaagctcaagaaatacacttcacttgttggccctttaggcatcaaagagtagatgaggaggggtgctggggacagaagagataaggcatttacctgccccacccatgggtcaggccaatcccagagaggcaatacatagagaggcctggagctagatcttagggacccctgctggcttctcgcagtggttcaaacaaggacttaattttcatcacgaggtcttactccggctactggccactgcactctccaccacagcaaatctctctctatgcgaagctaggcctcccacaactttggcttttcccccaaccttggtgtgggatcaattctttcccaaaaccagaggtgaaaaaggaaaggagagagggggaggaaacaggatggagggcagatgggaggaaggaaaggggggacagaagaaaggaaaaacattcattttgcttttaattgattgtaagcttcatgaggacagagaccatagctgacttattcccccggagtctaaggcaaccaaggcagcccgtgcaatgcctgatatactataggtgctcaataaatattatggatgggggaacagatggactgatagctggtggatgcataggtgtacatgtagatggatggacatgtggatggatgagtagatggatggatggatggatggatggatgaattgatggagagtcagtaggtgaacggatgaaaggatgatgaacagtcgtgtacatcaatgggttaatggatggatgggtcgatagatgggtcaggggatggatgaaatgctaggcccttttttttgttcatttatgtctttttatgcttcaaacactgccttgaattccctttgaacaaagtagtggtttaaacaagaaaactatccctcattagctctgtgagttaagtattatgattatcctgtaattcagatggggaacccatgactctgagaggcaaaacatcttgtgcaaggtcacctcttttctagctaggaaggggcccagccaggttccaaatcttgatctgtataagttgacccaaaactctctccactgtactagcatgctaaagaggctgagcatttacctgggggcattccacagcattttctacttaaacttaaccctgaacatctgagccccaatatctgctccaccctcaaggacacaggcacagtcagtatcttttctaataacattcatttacactccttgatacatcacatttcttttctggaatattccaactaacacctcttgtccctcagagatgaatggaccaggctgggtaaggcagggcatgaagtctttctaacacaaaaccaaatcatataagtaagggcagtgtcccagtggtctgtcagctcagctttctgctactctgatcctgattctgatctccataccccaaatgcacataaatgcaaaattatgtacacacacagactccatgtgtgtacataattttgcttttattgattgtaagcttcatgagaacagataccatagctgatttattcccccagagaacaagtggtctaattcattgtgttgtgatattcactgttttgcatgtgtcaactcttcatagtccaatgcctgggctccacaaagtcatacaaactctgactctatctttgtgagcatggtatgcagcttctaagaagtctcccaaaggtcttgcctcctgaaatttatgaccttttaaaattccctccccttgagcatgagttggatctagtgactttcttctagtgaatagagtgtggatgtctcttccaagattaggttaccaaaagattctggcttctgctttgttcacctcctttgccttcttgcttgctcgctctcattgcaggccagctgccatgtttatgaagcagggcagcctcagccaccagacagtgaggaactgagactctcagtccaacagcctgaaaggaactgaaccctgccaacaacctcccgagtgagattggaagcagattcttccccctgaggcttgagatgatgatagccccagcacccaagaccctgggccagaggactctgctaagccacacccagaatcctgccccacagaaactgtgaaataataagtgtttgttcctttaaccactgaatttaaaggaggggggtaatttattataccagcgtaaataaccacaccagcatagatatctaatactaacaactaatctgatacctactgaacatttgctctttgccaataactctaagagaaaagagagatgatccactccgtctcctctaaatattttcaatctgtgagtcagctagtaagaatagatcattataattcacctaaaaattatggtaaagttgttattcattggcagagtaaacaaacaaggcaagtcacatggccaaacccaaagttaaggggaagggaaatatattcccacctctttggtgggaggaactgcaaagtcacgtgacaaagaatatagctacaggaaggaatgaggaattagaacctgaaatgcaatctactctaaaggcctatggcagtttagaagaacaaacatacatacatttaatttggcataaaagggagcctgggaggaaatgtatcaaacgtagacactgggtgatgggggattacacatgatccctattccttctttatgttttttctatctccaaatattctacaatgattgtgttttcatttaaagtaagaaaaaaatgttactaaaaatatgagaagggccttggggcatgaaaaagggggaaattatttctggctgagagagccagagcacctaaaggcaggtaacatggagctggcattgaaaaataagttcttcagcataggagtgtgataaggctgttttagatccagaaaacagaataagcccctaatccaggagtgggacttgcctgaaagctgttatgacagtgagtacaccttagccaggggcatcgataggtaagtgactagcagtggtgaactcaccttgtcgaaagcagagtagggaagaatcgagtattatgccaagagtctcaaacatcagacacagaagggattttagacagcaaaacagccccttcattttgttcagttggaccatatgaaattactgatatttggtcgtttttaacctcagaatatagcaatttcatatggtccaacctaatatcaaggaggaaatcgaacttaaagagggtgcgtgatttttgcacagccacagagaaagtatcaaagccagaatatgttcaatgccatttaaagagtaaggaaatgaggatgagtccaatatgtttaagcctcccctatgagtaggtcagatgagggcaggtttggtgagggatatcttagaacctcagaaatgccaaccgtggagggttttactgtgtacacattgtcaggctcctagtaaaggaagcacttaatattcactgtcatcctaaataaagcaggtgcctctggctttgtctttaaagaccttctgcagaaaagcatgaggtgagcagggttgtagaagttccttgtaggcagagaggatatcacattcttctctgtggtgtctacaggtcatagcacaattctaggtaggaggccactgttcaatcatgtctgccaaatccaatgccagctatctcttcacttccatcctcctaggtgctggggctcagccagctgtcactgctttatctcccactgtcccaggtcagaagaagtctttctgatcttgttctgtaacttttatttttagttaagaagctttggtggcagggggtggggccaagagaagcaaggatagggacagtgcagtcatcaaggggtctgaagctcaggggtggctcctctgagccactttttgtattgcatttagaaaacataggtttttataagaaaacaaggggcaaatccatccctatcccggggggatttgggagcaagcattagcctcctaagagggttcacaagtttatacttagtctctctctctctctttttctctctctctctgacacacacacatacacgcacacacacacacaagcacacacccctttcgtatcaagcaccaggttgagtaggtcagaaaggaatggtaccattgttccctgtttatgcctgcttttcaagagactgccccagaaagtcacttctctacccttcccctacctgaaaatgagattagaacttgcccttgattttgccccaggaccggtccagctcagaatgctcacagcagggccattcaacacccactaatcatttcttcctatcttcccatgagattataataccctgggctctggctcctggtacagcctgactgtgttaggccccgacactctccagccactgcgaaataccctggaaaaaacaggtcctggaaaaaaaaaaagatctccttaaggagctgcagcctcaaactcctatttcaccaatgatattggtggggttggggggagggaatatagggattgagttgacctggaagaagggggatctggaagtagcccttcctaggtcctctgcacattgcagacctctgccctaatgtaagctgcacatggggggactccggcccttgaaaattcctcctcccatttgacagggccaagccaggcacccagcaacaacccagtccctcaggaaccccaactgcaaacttccaagcctctcctgaatcagagtgtctcagcttcaccttctgattgcccacgaaaaggagactggcccacctctgagttacatccagccaagcttcaggcttgggacccacttgcctctctttctcttcccagctcttgtttccaccaaacagagcttctcctgaatgtgggctgtagcactaaagcctcagagaagaggttgattctctgattctttccagctgtcagagaggccagctaagaataactgcacccaaaatagtacttgggatgatttaggtgtggctcagcccagaggcaggtggatggactagatgacctgtgggagtcttgtaccctccttggacacctcattcattcaaaaaaaatatgctgaacacctactatgtgccaggcactaggctatgtgctggggatgcaatgtgaagaaaatacatggagctctcagttcaataagtaaaccacagccccacctctgccctcatcccctcccctgctgtagtctgcttctgtaggtactgcctctgtgctatagcactatgttcaaacctctggcctagcttgtaacaccattttatacttaaccatctcttcagtggctcccctactagattctgaattctggagacaagaatcatttctgtatccccagagcttggtacattgactggcccattgtagatgtagaataaagataaatgggtgaatggatagatggatcgatggataatgggtggataaatagatggatggatcaagtactttatggagatcttgactagtatgagttttcttctatctgcttcttttgtggactccatttggtttggctctactatacagatttaggccatatgaattttaaatataagacgtctaaactgaacatctgagggagcataacgatggaaaaagcagtgtatggcatacaggctgaggcttcttactcccacaccagtggcctgctaagtccggacatgccctcagagtccttcttaacacagttcataggacatttgcagcctaccactaaaagtgttaggtatgttaaagcttgtttgccatccatgaactaggagatcagatttggcaaggggaggcagaggttaggctctgatagatcactgaaatcaaatgacaggtttgatgctcctaaaatgaagtcttcaatgaacagtcctgtgctattggagctgacactaagaagtacttacaaaatacattggcatttgcatccagatgctagttaatgatttttgtcctatttattgattaatggattgcttacttatttccacaagaaactctggaattcccaaagttccccatggaatctcagaacttccaaagccatccctagagaggatgaaattctaattatgtcaccatctcgctcagagcccctatggctctccatcacctacatgaaaaaattgcagctccgtagcaggctattcccaaccctccataaaatccaaggtacagccacagtggactgcctgccaatcagccactttctacaatgagaactttgccttcactttctccttccctaggaatcctgattccccatctcttcctcgtttaaatatgcacgttcttgtgacaacatggaaatgcttctggccaggagcgatggctcatgcctgtaacccctttgggaggccgaggtgggtggatcacttgaggacaggagttcgagaccagcgtggccaacatggtgaaaccccatctctactaaaaatacaaaaattagtcgggcttgatgctggcatgtagtcccagctactcaggaggctgaggcaggagaatcacttgaacctcagaggttgaggttgcagtgagcagagattgtgccactgcactccagcctgggtgacagagcgagactcagtaagaaaagaaaaatgcttccaattaatgattcacttaaaaaaaaacacaagaatgtctgcttaatatgatagcacatgatgtgacaaacaatagttatgaagaagcaatagcagagaaaaagctgacaagaaaagcggccaaatgccaaccaaactaaagttggtggtatgaaaatgtgagtaatatttcttctttattctattttctaaatggcttctaaggtagttctgttgcttttctattgagatcattagattcagccaacgtctactacaggacgggaattaagatatttctaaaccttacatctctaccacagcccagtccaaatattactaccttgaagatgctttccacgactagcctctgactgtcccaaacccgtaagacacagaatcttacccctctgtgtctcatagaccttcattaatatctattaaaggagttaccaggctcagtcttaaatcatagatgattttatgcattcctgtctccagctttgtgatggtatgactttttttaattaataaatgaaagaatggtcatgtttttagcctgcacttgtgttagaaaatatgatataatataatataatataatataatataatacaaattattacattctcataactacttttttaccccttctcaatatcttccccaacctccaaaaattattccaaatcccaggcattatttgtcaagaccaaaaggtagggatattcagggtagagactgcccagatctagcacatattggcctttaaaacaagtaaaaataactacttaggtaattaatttgtgggaaatattaaaacctactcttggttggaagctgtacacttatctgtggaatttaagcattcagcccgttggatgaagaattaggtgtgccaatgatactgacaataataagagaatgtgccttcactcccaactgagactgtgcagaattacccatcggactcacacaggtatggcataattggtggaggattatttgtttgaacttgcaaaatggatttctgaaatgtttgagctggtgctagaagtgttttcaaagtgcctgtatactcaccttaaacacacacattattaagggatttcatttgacatttaacaattttgtatattaatattgccctccttcccctaaatggcctaatctgtctaaatccacagcatcaaaagtcattacacagaaagaacaagatgttgccagagccactatggcccagcattgaatttgcgtgagctgagatgattcagggagatttatatcctgttatttcctgaactcagagcaaaacctcacaggttcaagattttgaaaagcatttgtctgagcaatctcacttcatcactttgaaagggatggtgtctctgccatctgcttaagcagcaatgccttcatgaaaaggaaaaaaatctccctctcctctctctctctctctctctctctctccagctaagtatgtgaacactagggtgaattccaaggcctatggccactgggaaaacaggatctttactcaatcttccttcccctggaaaattttcttttacttcttccctgggttcctatgacatggaaagaaaattgcagagagtttaggcggcactttggattctgaaatcattgctttgttctcactagcaaatgacataaaggttcagactagagtagtggttttaatcatttttgagccacacacacttttgagaatccgacgagaactatgtgttctctcactaaagaaaactagatatgtgaatatgcgcgaagttttgcttgcaaatataggtggttcttggtggtgaattactcatccatgactttctcaaggatctatgaaccccagcttaaatatctctgatctaaataaccaacacttgcatggctctttggtttacaaagtattttcaaatctgtctctcatttgacaacttagtaaacttgtcacccacttcactttcatacaaaaaaaaatatgttgtcaacctggctcacaagaaatgtattttgacttgctgctctcaaatcttaattttcatccaccctgcatattaaattgcactttgaaaatttagattctatttgttatatttgtaaaactaacttgttgctgttaatttctttgtattgtttgtttgttttactattaatgtggaaagatcacaggctgcattcaaagggctgggctggcatctggatgctaccatcgccaaacacctacagggaaggtccagaggatttcatgagtcacactaggattctcctcctagtccccagcgggcatgtcagtatcttggaacacatttcagtatacctattgtttccataaaacaaactacaaagaggagtcaagctacaaaatattccagactagtggcactgagcagaagatagaataagaaagagtttcaggtagcaggagttgttttgttttgtttttttgagacagagtctcactctgtcatccaggttggagtgcagtggcacaatcccagctcactgcaacctccgcctcccaggttcaagcaattctcctgcctcagcctcccaagtagctgggattacagacacatgccaccaagcctggctaattttttgtatttttagtagagacagggtttcaccatgttagccaggctggtctcgaagtcccgacttcatgtgatccgcctgcctcggcctcccaaagtgctgagattacaggcatgagccactgtacctggccatgaagttttattttaatgatttcttaactgctgagataatgatttgaagtgtctatcccaatgttagtttcctagtcctctatctttgagtgggaggctatgaaattaaagaacccaattgttttaccaaatattctgaattattaatagattatcagaacgaaggcatggatgctgtcacaggctaaatatgaacctggccagaatccaagcctcttaccacctggaagaacctactggaccaccacttacacattgcctaatatctctgctccaaagcgctaccccatctttgctcactgcatcccagccttctgcccagctgggctgttggctgaatgtggtcagggccagaatgaaaagtaggcaaagtggacagcttaaggacctcctgtatctttgtctccagcctcagatggagagtccagggccagagctcacctatacagtaccttattattattattattattattattattattatactttaagttctagggtacatgtgcacaacgtgcaggtttgttatataagtatacgtgtgccatgttggtttgctgcacccatcaactcgtcatttacattaggtaattctcctaatgctatccctccaaccccccgacaggccccagtgtgtaatgttccccaccctctgtccatgtgttctcgttgttcaactcccacctatgagtaagaacatgtggtgtttggttctctgtccttgtgatagtttgcttagaatgatggtttccagcttcatccatgtccctgcaaaggacatgaactcatccttttttaaggctgcatagtattccacggtgtatatatgccacattttcttaatctagtctatcactgatggatatttgggttggttccaagtctttgctattgtgaatagtaccacaataaacatacgagtacatgtgtctttatagtagcatgatttataatcctttgggtatatacccagtaatgggatcactgtgacttagaataagatgcctcctctgggagaactgattagaaaaggtagtccaactagcctgccccaacccggaaggcacacgacttgacaatcagaaggactgaatttcagcctttgtgctccccaagacctggtgcttttgatcagttaatagactgaataacctgggagcaagcctccccttcaggtcacagttattcttcttgcagaggacttaggcctatgagcataggagtcaacaaccccaaacagggaggaggccaaatggctccagtctgggattagatgctacaaaccctgctctttagtgctgctgttattgaccatcatcatgcatttaattaacaaataattaatgagcccattccatataccagctacatgaagtaaattgagtaggttttcatttgcttcttacaaaatctcagcaagataataattattattcccattttgtaaggaagtaaactgaggctcagagagactaggtcatttgctcaaggtcatacagctaataaatggcaggactgggatgcaaacccacttgtgtctgacttcacagtctcctgtggacccaccctatgccttaagccagtgattgtcaaacctggttgt[450 bp omitted]ttgttgttgttaagatggaatctcactctgtcacccaggctggactgcagtgtagtgatctcagctcactacaacctccatctcctgggttcaagcaattctcatgcctcagcctctcagtagctgggatcacaggtacctgccaccacacccagataacttttgtatttttagtagagacagggtttcaccatgctgaccaggctggtcttgaacttctgacctcaagtgatctgcctgcatcggcctccgaaagtgttgggattacaggtgtgagccaccacacctggccaagaatagagtattaaaaaggaggttggtggggtgggaacaaccgggaaacagggaaaacaacagtagaggagataactgagtttggggcttctttgttactcagcattattgcagcaatagctgactgacatatcaccaaaccatgttttagttaacatctatttaatagccaattgaacaaacatttcaaggaatacattttagaaagtgcttctctaggaatatctgaggcaagtccagcattcccagctttatgtgcctccttagcctcaccgttcagagggcacggcctttgtttagtgtttaatatgggtggctcatctccctgcacaatagtaatacaataataataatagcagacctatggtcctgttctaagcactatacaagttataactcaactgctcttcagggtaggtatatctacttcccctattttacagattaggaaacggaagcacagagaggtgaaataacttgcccagggttacccagacagacaacctgacaccagagtatatgtccttcattttggcctcatgacagttttcctcaagactctgtctgcctattttctctgccccactcagggtcatatttctgagggtcactcgagcactgcttcatccctctctgcctagcctagtgtagtcaaggcaccttagcaagtgtcgggagagagaaagagcccttgtctgataattacaaggtctagggtctcactgcaggactgctactaagtggctacaaatcctgagcaagttattttcctctctgggtttaagtttccttcttttcaaatgagggctctacattgaatcatctataaagattctgaaaagtcctgcaataaatcgaactaactcaccaggattccctaaactaaaaatgaccacggtggtagattgcattattgctcccaatttttcacccctccctgtatccacaatctctgccatgactttgcagttcctgccactagaggtggagtatatttccctgctttgttaatactgggcttggccatgtgacttagtctgggcaatgggatgttaatgggcatgacctgagaaaaggcttgaaatatatttatgcaggttagtttgcccacttattcttccataaccatgagaaaaccatgccctgggaagcctactgatcccagaagaatgagagacttgtggagcagaggcattccatccagctgccccacaggtctgtaggcatactttaaaaatagtcataaatattattgtcagcaactcagtttggggctgctttgttactcagcattattgcagcaatagctaactgatataccaccaaaccatattttagttaacatctattaaatggccaattgaacaaatgttccaaggagcacattttaagaagtgctcctctaggaatatctgaggcaagtccagcattcccagctttatgtgccttccttagcctcaccattcaaagggcacagcctttgcttagtgtttaatatgggcagctgatctccctgcacaaactaaagctccctgaaggcaagaacttttcaagatcatctttctatgcccaatgcctggcacagagcctagcatacaataggtgcccaataaatgttggttaaatgaaaaaaaaagtggaaatgatggccctgtcatcgttgtaactgtatgggcctctgttttgtcccaggaatgtgaacaagatgatctctaagtatcttcccattttcaatgccttggagttaagcaatcaacatcccttctttaataaaccatctgtgacgactggaagcccagactggaagcctccatgccaaccttgccatgtccactcttgatttccggtttcattttatctattaattcagccaccatttactctgctcttattaagtgcttctgttgtggacataacaaacatgcaagacacactctctgcactggagaagcttagagtttctgccagtctaattggcactgagatttgaggctcaaagtccttagacagagacatgcagaggaaggtcagtcacccaaagttacagagcaggaggtggcatggccaaactcgaaccctaggcctcagaggccctatttactgccctctcctcctgagtccagacagtaaaccatcctgcctttggtggaaatccaagaaagtcagcttgtcctggcatggagcgtctaactaattaagcatctttctctccctctcaggcaactctgaaggctcctcaagcaaatttggggatttcccagagggggccaggctcttgtcacttcagcaataatatcctttcacaccctctagtggttagagggcaacccgacatcctggaggaatgaggtgactcccctgggcctataaagtgagcctgttttactaaacacagtcctctgggaaagcaatttggcaataagtatcaaaagccataaacacagtcctaccctttaacccagtaattccacttctgggactctattccaaggtgataatccaaaaataaaggcaaagtctgttagcacaatgatgttcattgcctcattgtttataatatctaaaattagtaaatatcctaagtgaccaaaaatagggaaatggttaagcaaattatggcacctctacacaaaagagtaagtattatgaagccacttaaaatgatgggaagtggcatggtaaaatagcagggatatgaatatggaaattaagagggaccaatttggtttctatcagttggttactgctgacaagctacttaagccctctgagcctcagtttctcatctataaaatagagctaatgacacccaccttgaaaatggaaaagattaggtaagaaactgtgtgcagagtccctagcaccatactgggcacacagcagatatataataaatggaattgttactactgttattcctaagctttaaaattatgttacaacaggaaaaatacatctgaaaccacagtaagcaaagagaaaacagcaaaatagtatgttcactatgcaaaacaaagaaagaaacataggaagaaaacttctgaaagatatacatcaaatgctgacaacgagttgttttttcccccagcaaaaatttcttgagtagaatgtgctcagaactgagtgtgcattcaagatacgaagattaaagacagcatgctaaggaactcacagtccactaggtgattcagttaagtcaacgggcagcacagatgaaagcaggtaaaggggaggtctcaagaaaggttagcttgaagtagtagctgagctggctcttgaagtctgatacacttttccgaatcttccaagagggtgtcatcttattttgcagagtttagtttcctgacactcacccagcttccacctacgtaacgcatttgggaatggctgaggagaagagttgagaggaggttagtagagacaaagcgtattagtttttactgcaccccatacccaacataatcctgcaaaatcttcagtccttcctatatagggaagttccctaaaagaggcacagatagtgatatgccaaaccagcaagcaaaacacaggaaggagttgaggtcatttcttctctctcactgtattagctactttgaattttccagagagactcatgagtatcaaccaaagttttacattattttgcaaggttttctcccctggctgttgtagcaataaggaacaagccctgcaagcctctttgactctacactaaatgtaacagatgttaccagtgtttctaaggtctccagcctggaaaacactaggatcatgaaggcaggaaggaagcagttcttccttggccccctctcaagagaaagatcattgaaattgcagccccaatccaaatctcctctctagatcaagaggttaaagtcatgggggtctcacaaattgccctcgttttcttctattcccatttgatctctaggtttctgggtcttaagggtaggacctggataatttgaggtgctcagagaattcagatatcattgtaactgccagcctcattccctggataattcatccattaccttccaaatcccttctgtccatctcagagaagtagttctctgtcccacttactgttgctgcataacacatctccccaagctcagtggtatatatagctttttaaaaataccaatggttttgttatgtccagggattctctctaagtcagaagtttttaaaggacacatagagtaaatgactctttttcatgtctctagggtctcagccgaaaagattcatgttggagctgacttgaaggctggcaggtggaatcatcttaaagcgtatctggtaggtaatgctggctgtagactgggacttcagcagtggatgtcagcaggaacacctacacatggcctttccatgtggctgcttgggcttcctcacatcatggtgcctggatcccaggagttagccttccaaaagagccaagccttgagtcacatgccatcatttctgctatagtcacaacccatccattttatgctgggtcacaagtggtctttgggccactgataccacgaagagtgttcttctctcttttcacagctcccacccccagaggactgtggaacttatttcatgggaaccaggccagagtatcactagcactccccaaacttgttcctaagtcatttacacatcaagttatgacatcttctcccaccaaactgttcccattccccacatccagtacaaagtcttaggaggacaaggtaacccttttttatcactatctaagaagtcttagtccaaaagctcattatcagccccaaaatgttaaggcacataagcctttcccattaagacaaaacaaaacaaagcaaaaccctagtagactcacctggccacccctctggtgtataccagatatatatgaattggctgaagcccaggcctgcacaagtgaagtcaagtgaggaggaaagtctttgaggatgtggctacataaaaccctaaagatggctttagtgcatagcaccctgggaatctcaaattggaaagaagttgtttgacatatagaagtaggccccatttgaagaaaatccagttggcaataatccaagcttttaaccacaaattttttaaatgcaggggtgacttcctcactttctatcaaaaatgatgcttttattaaaggaacttccttgaaggatttaagtgttggtttataaattggcagcaactaagaggcagaaaaatataaaactaagaattgggctcacagccaatcaaggacgaatcacaaatcaagactaacttctgaagctaaacacccagcattgtggaagtgggattagctttacacacatgcgcgtacgctttaaatgacaaaccgggaacccattcattatgtaaagtcaagcattcctatgatgtggacctggcactgcatcccaggcctgctgagtaacatgaacaaatgcaaagaagcagtaggacaaggacagcatgtttatggaaagtggagggaatgaacatgcctagggaagagactcttgtgtcaggaagcaggtgaacataaagttggccaggtagggtggggccacttttgcaggccaagatgtttttcctccaagaggagcatgatcaaagaggagtttttggaagattaatctggtagaagcacctgaggacagtattgagacagggacagcagctatggagttttcacagccatgaagctgtgaggggaagaaggaggagctggtggtctctctccatgagaaaggcataaaggaaaatggcacatgtattcagccaggctcagattttactgcaagccttttcatctttggaacaatgatatttctaaactatttcctaagaaccatcttttctgggactctaagtccctcttgaactgtctttccagcttctaaaactccacattcttaggagagggagtaaggtgggttaaatccaaggttgttcaagacatagatgaagattaatggggactagtaattatttaaacaaacctatgggtccttaagcctccaagaacagagtcatctttcaaacctggactctaaggaggccatgttccaatgacaaataatcaaacaatcaagtcttcatatttctttggggactaccttcagagtcttcaatatatccattttaaacatagccatatcatattttaacaatattgctgttgttgttgttttaagaaataaccacaagccaaatctggtagagaaagagataatcactcaagctaggtaatggccctttgggttaaaacaaacaaataaacaaaacaggtgggacttggaagaaatacattgagacaaagtgagtgagagtgttttcttatctttatcatctctgctatatgtgtaatgatatctcattcttcattcatattatttatctgcacctttgctcacttcatcttgaccaatattgctagtttgtcttactttaaagtcttttcaaagatctaacttggaggtacaggaaattaaaaagtaaagaacaacaaaaaatgcaattgatttccttgtgcaattgtaaactggctgagaagaaaatttccccaaaaagaagttgtaaaaaagattttgagtaagagtagtagttcaatttggctaacactaaatgaagactctctgcaaagatgtcattgttttcatcaacaggactcggatgcaggtaaaaagtaacaagagtcactgccctcaaggaacctatgaactactgaatggcctcccatgttggctacattaacagaaatggcatttatgaagtgtctaattaatatttttcatttcctcttattgtgacagagacattaaattctcactaaatggccatgggctctcctacctttcccaggttcccttgcagttggattagaaccatgtgaccatttctgaccaatggaacatgggagaaagtgatgtatgcaacttccaaacctagtgctatcagcccctatgtagtcctccagctttctctttccatgctgcagtgatcacgttatacgatgacctggtatagctgtaagacaggaacagccaagaccctgagtcaccacccggaagagaggtgctctagagattcacttgactcacatggggatgttgtacgatagatataaatcttgatatggttaaaccactgagttttgggcctttctttgttaccacaactgagctgatcttattctgacattcttgctaaaattccgaaataaccatcataatgattgtcaacatagtgtggtggagaaataaaaacctttagagcagcaacaacctgggtgaaggtaatgatgcttaaaggtggctcagctcatcagtcatttgcagttaacaaatcttggaagagactaatcctcttcctcctgagagaacagacttattgctcctggagacagggaaagagaaaagatggcctatctcagtcttccggtggacaatctgggagagtcagatcacagactgcctgaatttttatgcaacaggagtgtaccccttccacccatatgctctaacatatccagaaaggacttccaagacaattaactttcttcctttaaaattatttcttcctttaaaaaacagatatatgaatattattttctcgttacaatatatttatatattttttagatcaaaccaaagagttgaagggaagttccttccactttcctagaataaccacactgggccacctttctttattgttccaggctgttctttgcatttatatccatataaaggtacatagttttgctttgagtcttcagtgtacttttggtcctgaggcacaaatgggccaaacagcaggtaccattctgccctgttgttctttgactttatgacttgtttcttttctgacttttgatgtatttcaacatgtttggtcaacttaatgcctttttattgctgcacagctctccacagtatggaggtaccataatttatgtaatgacttccccattggtagacatatatagtgttttgaaactgtaatgaacatgcttggaatgcccctttgtgtacacaagccagtatttctctaggatggatacctgaaaaggaactatctgcttcaaaggatttgcatatttttagtttcaatagaaactgccaaattgctaaagaaagaagccataccaacttatacttgcatcaacaatatataggttctgatcttttttttgttaagaaatgttgatgacttatagattgaagaattttatattaacagacgtgcaatattggcttattatgaggttgcctcggcacttgcctgattgcagagaaggatgatcctttattgcctgccagtaggtttcaccatggtgttcattagccacaggccctggcccctcccaggaagacctctttcaatattgacagggggggattttttgttcctttagtgagcagtgacctctagctgttgtgcactgcctttttgagagtcacaatcccccggccagaccacccagaattgtaggcgtaatagcagtggtacgttaggaccaggggaagacgagggaagagctcaccttggggatgccaaaaattcaattatcaagatagatatgtaggatcaaatgcagtatttttgaaaatcaaaattaatgcaaaaagtccacaattttaatacaaaatttcaaatagacaggattggtattagtgattttttcagtggcctcaggctccagtaggattctgcaatagtccagaacaacagtcatctgtcattttaagcagatctgggagactcgtagacagacagacagacacacacacacacacacacacacacacacacacacttcttaaaatccctgcttgcctgtgtggccttggggaaattgctgaacctctctgagactcagtttcattatttgtgagttgtcaaggagttttcaataagcatcccccaccacctgtactagtgcttgtgctattgttaggcaccaatgcaaccctactggctgctggttcttctatgatccttgagcctggtttggcctcttacctatttcctggtgaccaagtgacccctttatagactggagattgttaataggagggaatgaatatttactgggactttttttaaactacactgtgggatgggtacttccatgcattatctcagttaatctgcatagcaacccttcagatatatagatgagaaaactcaagttcagagaagttaaatgacttgccctcagtcacagagcaagccagtggctgagcggggctctggaaccagatcttgtatatgtaagtatatagtctaacgtttacttctctctgggctgtgtcagtagaagcaagagaaaagagcctgctacatctgaatacagacctcaagggcaaatgctccctcccaactgtgtatccgaattaaaaacagcaagttttgttcctgactcagcccaaacctactaccttcagaggtgcttgtttctcttgtccaaaccccaggatgcctgtgatttcctctcctaaagcagatgaccgttggcccagcctctcctcactgcctcccacctccccaaccccacaccactcactccacccagatgacacccccttatccctcctgacatcaaggtggacagtaaaacaacacagttccatttaccttcaccctagcccgcccccggctcagtcaccccactctctgggcctttctgccaagctctccaggcagccacatgcacaagagaaggctgagggtgggccaggctgtgcagaatgagggttttcagaagcgctcttggctcctgcacttagaacctttggagacctctggaggttcagcagctacgtgctcctctctgcttggcccaaaggggtgaaggccacctggccatgccaggccgggccaccatggcgacatggcccctggggaagtgagagagggggctggaaggaggaattcccttcccagagtcacaccatggttagattctattccaagaacctgcctctgccatccctgtcttcttcccagcttaacttccctaatggtgtatgtcactgaggggagaatcacggctggctttctctatgaattcgcaaatcatcttgttgtcatcactgggtaggggaaggctgtggtggggaggggccaaaatcaataaccccattttctgtcacctgccccttcttcactcccctcaccacccagggccaggagcctcagttcacacaaatgtcatttgtccaacctgccagatcttagcattgacatgccctctagtggatttagaaaaacaacaaagaacacacacacacacacacacacacacacacgcagaggcacacccacaccaaacaatggtcaattaattccggctgtgtccacaaggccctgatgccaaagcaatgccattcaaggaagcccctcagcccagcccaagctgccacacgacagcagagtccacggagcacagcttccgggtcctgaccagcagcctggggtgtttggggccaacctttgccattaacaggaatggtacccagggcctggttattgtggcccatgctggacgtggggaccctccccacttttctctcccaagctttctgtgcctggagcgcctagaacactcaagactcaactccagcatcttccttccaacagcactccttccaggcaccccccgcccttttcctaatagacacaaatctttatgcccagtcctgtttcctccaaccatgtgtccctgcgtactggcttctggtggtgctcctgtgtctgtggatagctccctgttacggtctatctcagggtttctcaccctctgcatcatggacattttggtccgaatcattctttattgcaggggggccatcctgtgtattgtgtgatgtttagctgcatccctggcctctactcactagatgcaagtagcactcctccatttgtgacaaccaaaaatatttccaaatgtctccaggtgggtgggagggagcaaaatcctcccacagttgacatataccggcctatctgtggaagtcattgtgaaccagaggtaggatctgagggtgcaggaagccctcctcctcatctatgtgattagtgtctttagggctgagaaggcctcttaggcttcagagggtcctattgaagggcatttccccaggcagggtcaatcgcaggggctgctgcattccacctgtctggcaggataaggcatggcatgtggggtgtgtgaagctgaggatacggaagaggcaggggcagagagggatgttggaaacagggagatgctgaggttggtggttactgagttccacacactacaacatgacttagcttatcccctatttcatttcatccttagagggtcccaataatcaacaacaacaacctggaggcctcaccatgtgccagacatgatgttaacgctactttccctgaggaagaaatgtatgtgaacctcattttacagatgaggaaagtaagacttggggaaggtgggtcacttgcccaaagagccaacgctgaggcccccacctgtcctacgactctccaaaatgtgtcaccagaatgctaaatgcactgagggtaggtgtctccccaggtgtgaaatcaggtaagtccttgacctaatttcagattctgcttcagtgctgacccagctggggcactaaactcagggtaacctagattaattatgtgtctgttatccagttacttagtaaatgctttttggctgtttctttcacacagactccatgagcccaggacactgccccccacccactaccccagcaaggactctctcatttctctggcttgtccccagggtgtccagctccccgctgctccatggacctgatggaccagactggatgcccaggagaatgacgggggggccaaatcctgtcctccgcacagcctgctgcctcctcaggtgggatccacaggcagcactgccagaagggcaggacactgagccaggtgccaaggggcctggggccacatttggctgagtgaccttagccaagtcattctcctcctggacctcagccagccagccaaaacccagcccccaccctctaactctcccagagatgtgcaaagtaaatggttacccagcactgctcataacgtcatacggtggggagaggatgggagacaactcatacaagttcccttccccccatcttcccagtccaccccaactcacccatttcaacaaaaatcagccacatcagagcttccgagacaccctgcccagagaaggaggccaggattgccaacccaagcagctgctcctctgcaggttggctttgaatgtgaactttcttccttttggaaacttggccaaaaacaggtggggacaggcggctctgagaagaccctagagggagggcactcactcccttcagcatacctattccgcatttgagaaaccacacataggacgtgatttatcatccagtataactccaataaaaatacaccaacttccaaagaggagggagatgcaattgtgaggtttctcaccctgcaaatctttttcttggcttttcacccacctgcctctacttgtcccaagaagatgagcaccaggaggtggggatgggtggggcttaggccagacccagtgggaaggctacagaagaatccaagggcactgtcttagtccattcaggctgctataacaaaatgtcatacacgaacgttgcttacaagcaacagaaatttatttctcaacagttctggaggctgcgaagtccaagatcaaaatactggcagattcagtacctggtgagggctcattcattattgaggtccatattctcactgcgccctttagagtggaaaaggtgagggctctttttagggcccattttataaatgcactaatcccattacaaggtcactaatcccatgagggtggagcccttgtgacctaatcatctcccaaagaccccacctactaataccatcttcctggggtttaggatttcaacacacgaatttggtggggccacaaacattcagaccagagtagacactgccattgctttgcagagagatgtgaatatggtgttcaggttcttccaatcagagacaaagcccgggggcactgtggcttctgcatccctcccacaacaccacccacccaggagggatccagctgcagcacctccatgcccacccccaaccggtgcccaggcaggctgtggagttgatgggcacagaacatgagctctaaagtcagaaccacctcagcttgaatctaggctcctccacgaaactccctgcatgatctcaggcttgtcgtttcatctcctcccatatcctatgtaagaatcctgtcacgaaagatgcttggagaatgagatgagatgcttcaagtaaaatgtagggtagccagcacaaggctaagacaggtcgtcttctcttgccaaatagacatcccttgagtaaagagatgaggtagggggctgaggggccagtgagccccccaacatcatactgtaatatcccagagggagaaaaacaataatggtaagaaatgaagtaggactatcaaaagcaggtgaaatttattactcttttgatgctgtactgttaaaagtcacaaatctccactcaagagagactgtgaaaacaatgaaaaatgatgagataataaatgtcagcccaagacaagaactatcatttacaagaccagaccatcctgagcccattccacactctgggagttctttctttaacaaaattatacaagggggatatataacattgtaattctttatatccttaaccctataaaccactccccttcccagctaacacccccagccctgaccttaccccaatctagtatcttcagacccatttatttatttatctatgtatttatgtatgtgtttatttgttatgttttatttatttccagggctgcttctttctttgtgtacatcctggcaagacaccgcttagtttgaataaactctgagctctgagaaatgtggaggtgattcccgaacccaatgtcctaagcctgccaaggatgcgaacacggagcctacttcctcccctcagctcccatctccaacacacagagatccagcctgggctgggggcacagagagacatgccaataaaggaatcaggctgtggcaaagaaagaattaagccaacactgaaatacacacacacacacgtgcacacgcacatacacacacacacacacacacatgtgtttgggccacctggcttcctgctcccagtgctgcagccatctggacagtggagagagagaaatccaggaaaggctattcctggctgggagattctgagaatcacactgtaaggcgatcccggggctcaagcttcggtggcaggaggggagccacttcaagataaggcaacacggggagtggggagaatgatctgttccatgcagacagcacagtcccatccctatgaggcacgcgggctgtgggggctgcccatgggagccagatttcactctgccctccatgaattcccaccccaatgagaaacacatggagttaaactttagtgtcctctgctgcaaagtggggagggtcaataattttcaagggacaagagactcagtagtttctcccagctttatgtcttgctccacataatcaaggtgtacacaacgatagatcttgtcttaatttcaatttattttactttatttagttttttttccaattaagagctcaagtacccaatgcctcaacaacagaggttcagtatctcattcttgagaaccacccccaactccaatttgctctaaaatactgagaacttactcaaaccagagtgcctagtctccatctaaacttgcaagccaaagactcctaggatttggtcagttcatcattacttttagttcccacagcccagtggtgtggttactggggatggatccacagttagcaaatgtccttgttggttcagacccctgctcacattactatgatgcaccaagataattctttgtagttcacattccctccccagtattgtctagagccaaccactgagttgggaaacttggaacacacatgtttctagcagtgccagcaacaagccttgctagaccagccctccctgggaaacttgaagccatgtggtgaccccaggccccaggaaaaacgctctgctttcttaaaataattttattttaaggagtttgccccctatctatctggccactggaacttggttggaacaacttcactttgaactaaggggaacagaggatggcatgtctgttcttttccttctctgaaggccatggacccttaggaaattgatgcctttcctcccagcaatcagatctgcatacagaggaaccccaggtcttattatcgccttgtccagaataatgagtgcctacttgcttatatttgtatagatagaaggaggaaattttcaagtgcctgtcccctaaatagtgatgggctgagccaagataatttgtaggtagtttctaggaataaatttagacagtctggcataatttatttgcttttatttatttatttattttttgagatggggtctcactctatcatccaggctggagtgcggtggcacaatatcagctcactgcaacttctgctttgaggtctcaagagatcctccatccccagcctctcaagtagctgggaccaccatgcttagctattttttttgtatttttggtagagagagggtttcaccatgttgcctaggctggtctcaaactcctgacctcaaatgatccatccacctcagcctcccaaagtgctgggattacaggcatgagccaccatacctggcctagtctggcataattcctaatgccccttcctctcctttaacaaaattatacaatcgggctatataatattgcaattctctgtgtccctaatctagtaaatcatccccttcccagctaactcccccagccctgctcttatcctaacctagtatctttggagctatccacttatttattcatgtattgatgtgttttccaaggaggtaaggccagtgttcccaagtcatagtgactctcagatccatccttttaaaactaattcaaatgctacctccaccattgtcctggaagaagtaatcgtgacccaccacaaactccctcagcaacaatattaatctgccataacagaattctacagaccggatggcttaaaccaggggtccccaacccctgggtcatgaaccagtaccagtctgtggcctgttaggaaccaggccacacagctggaggtgagtggtaggcaagcttcatctgtatttacagccactccccattgctcacattaccacctgagctccacctcctatcagatcagtggtggcactagcttctcataggaaacacaaaccctattgtgaattgtgcatgcaaggaatctaggttgcacactccttataagaatctaatgcctgattatctgaggtggagctgaagcagtaatgcttatgccggggagtggctgcaaatacagattaacattagcagagaggtttgactggacagagatcataataaatcagttgcttgcagactcatatcaaaactctatccgtgagtggcatgtgacaattaagctgcagcatctcgtggcaggctttatagtggcaagtgagttgatgtacttcaactgtacagctgcagctggtgcccttaaaggtatgtttaagacaacttcaaatctctatacattctggattaaagtcaaggcagagtatcctgagattgccacaaaagtgctgaaaagcctgctttcatttcctacatcctatctttgtaaagcagggttttctgcagtgatagcaaacaaaatgagattataagcaacacacttcaggtgatactatctcccatcacccccagaggggaacatctagttgcaggaaaacaaactcagggctcccactgattctacattatggtgagttgtataattatttcattatatattacaacgtaataataatagaagtaaagtgcaccataaatgtcatgtacttgaatcatctcaaaaccatctccccaatccccacccctggtcttggaagaattgtcttccaagaaaccggtcccctgtgtcaaaaaggctggggactcttagcttaaacaccagaaatttattttctcacagttctggaggctggaagtcagagatcaaggtgacagcagggttggtttcttctgaggtgtctctccttgacttgaagacggccgtcttctccctgtatcttcactctgtgcctgtctgtgtcccaatttcctcttctgtctcacaggctggagtgcagtggaataatcttggctcactgcaacctccacctcctgagttcaaacaattctccctacctcagcctcccaagtagccgggattacaggcactcaccaccacgcccggctaatttttgtgttttcagtagagatggggtttcaccatgttggccaggctggtctaaaactcctgacctcagctgatccacccaccttgccctcccaaagtgctgggattgcaggaatgagccaccaggcccggcccctaatttcttcttataaggaccccattcagattgcactggggcccatgcatatgatctcactttaccttaattaccattttaaatgcctctaaatacagtcacattctaagttcctgcgagtaggacttcctcatatgaatttggtgagatacgcaattctacatgtaactgcaatctatccattgctcactagaatgaaaatccaggaggacaggggtttgtgcccagcacatggtaggggctcagtaactattttttttaaatgaatgcatctctggggggttcttattactttgtaccttgtaatgtaggtgtaacctccactatctgcaggatgctttcatgcagggcttttgtgaggtagctatcacagaccctagtactgggctttggtcagatgaactaggagaagatgcctttgtaaaaagaaaacctggactcaacttccctcctttgctagttcctggctatatgcctctgagccattcactccatccctccaagcctcagcttcccttctgtgaacctgacataacaatgcctgcctcacaggcttcttcagagatctggctgagatcactgtgtgaaggccttctgtaaactctaaagtgttcttacgaatgctacccatcattctcaggcattttgcagcagatactttttcagttgctgtggctacataataaattacccccaaaacttagtgtcttaaaacaataataacatttattttactcagaaattgtaactggtcaggactcagtgaggtagatcatctctgttccactcaggcacccaccgaggcagctccaaggctggggactggaagtgtaggaaaatatactcacaggtcaggcagttgatgctgcaggtcagctaagatcttagtggacccattggccacaacacccacatgtggcctctccatatggcctgggcttcctcacaccatggagattggattccaagatggaggccaccgagaacaaaccagggaaagtcatactgcgttttatgacctggccttgcagcatcacttccacagcatgctattaattaagcatcacaaaggttcaaggatggggaaaataggctcagcctttggaggggaaatggcaaggttctggaagaatatgtgggcctgaaaatattgctgtggccatttttggagaagaccatttcccatagtacttgatacattttctgaacaaatgaacctttcctcactgcctttcagcattgttcaagcctctctctacaagtctttcattgcacagcctcatgctgtagatcttctctagcttcctcattcaaaatgtaccagtctccatcccaatctatcatagccctgccttttgcaagagaagagttgatgtaatagattaatagataaaccaatttctaacacagtactagcttagctagagggctcttcttaggctgtagaaaagtggctaggcacaggtggcttaggccaagcatggtgactcatacctgtaatctctgcactttgggaggctgaagtgggaggatcacttgaggccaagagtttgagatcagactgggtaacatagcaagaccctgtatcgacaaaaatgaaaaaaaaatagctgggcatggtggcatgcatgtataatcccaactactcaaaaagaagaaagaaagaaagaaagaaagaaagaaagaaagaaagaaagaaagaaagaaagaaagaaagaaagaaagagaagaaagaaagaaagagaagaaaagaaaagaaagggaaaggaaaggaagaaagaaagaaaagaaagagagagaaaggctgcccctcttacaccactaatggatccaggaggtcaacccttgggaacttcagagagaggaatgaaccaaattgggagggaggagggaggcagagtgggtgactggtgagtttctcacacccttcagccttgaatcccaggcagccacctggcccatgcgtaggtgaacctcttgctccctacccatccactcctccctgcactctgccccctgccactttcctctgcttaatctttggtgatgggtaaaccctccaggcttagaaagatagtcttccagcctgagttagttgattatgaacctggtgtcctcaacccatacttcttcaccccactgtggttccagagactggtaggaggacctagtcaatcttcccagctgacaaaggccacttaatggtcaaatactcaacaagtcatctagttcactgcaggaaccatctgaagaacattaaccctctttccccaaaccatgttgtttttcacacatccctcctttttttttttttttttttttttttttttttttttgagacggagtctcgctctgtcgcccaggctggagtgcagtggcgggatctcggctcactgcaagctccgcctcccgggttcacgccattctcctgcctcagcctcccaagtagctgggactgcaggcgcccgccactacgcccggctaatttttttttttttttgtatttttagtagagacggggtttcaccgttttagccgggatggtctcgatctcctgacctcgtgatccgcccgcctcggcctcccaaagtgctgggattacaggcgtgagccaccgcgcccggccatcccttctgattcatctgaatttgttctctgactcattaggtctgtgttgtccttaattacattctgcaacaataatgaaatatcagcgtcttcattttttattatgttcctgctggtcatgaggttccagcttatatcatggagctcaaggggcagccactggaaaagtccaccccctgttctctctctttctgtcgtacacacacgcacttgtgcatacactcacacgctccctcgcacacacgcaagtgcatacactcacactccatcgtatgcacacactccctcatatgcacacacaagtgcacacactcacacactccctcacacacacagaagggcatacacttacacactccctcgcatgcacacactccctcacatgcacacacaagtgcatacactcacacattccctcacacacacacacaagtgcacacactcacatgctcccttagttgacttctcactgcctcaaggtaaagcccaaactccttaacctgacttatgaacagctctgaggtcttgtcctgcgggtgtctccagcttcatctcttgtcactcttctttcacgttaagacaggctgagcttcttttggctccttaaatggtctgtgttctctcttaccttattcatacaattccctccaaccagagcattctttccctttcccctcaatattcagctctcagcttggaaggcactttccaggaaagcctttcttgacccttcagtaacattagttatcttggctttatgttctctttatgccctgcattttcctcttgtaactctcagcacaaactactgtaattacttgatataagttgtttgtcttcttccaccgcccccaccttaagtttggcaagggcagaactgtgtctatgtctgtcctgtttgtcacagtatcccctaagaacagcatcaagcgtggcacacagacaatgcttggatgaatgaaactggaggagatatatcactcctaaccagaatcactggctgtcttagtctgtttgtgctgctctaacaaaatatctaagactgggtaatttataaagaacagaaatgtatttctcacagttctgggggctgggaagtccaagaccaagataccagtgggtttggtgtctagtaggggtcatgggtcatggtctacacttccaaaatggcgccttgaatgttttagccctctgaggcaaggcagaagagtggaagagcaaagagagggtgagagagagcaagtgggctaaactcatccttttataaggagcccactcccatgataatggaacccattcctgcaataatggcattaatcaattcatgaggggagagccctcatggccgaagcatctctccttaggctccaaccctcagcattgttgcattggggattaagtttccaaagcatgctttatgggggacatattatagctgtggcttatctcctcagttctgaacatcatcagcacagttaagtaaagttcaaaaacatcctaggtgctatcgaccaaagtgaaggaatggacagggggaaaagaaagagcaatctggggagaagaaggagggtggtgaagaaagcaagtgaaacagggtaaaggctgtgcacagggcacccttcttctcacactggagtccatgtggccccagggtacatgccaatatgcttgggagtaactaaagccacagaataaacagggcacatctcagagggtctgtttggacaatatgtcatttaaaaattatttttagatttaaaaaagatttattataaagtcagattttaaaacccacattaatttttaaggaaataaataagacttcaaagacacttcctgtgtttgtggtaaggtcttttctctacccctctccctcactcccttccagggataatccatgtaccaaaatcttgccttctggttttgggggtttaagaagccctgcaatgaggcctgggcctcctcaccacatggtgactggatggtaagaaagatggagcacggaaagagagagccagggaaagccatattgccttttctgacctggcctcacagcatcactttcactgtgttctattaatctctaggcccttttcatcccttgaaggtcagatgtttgcaaaagatagaataaggagagaccattttactttcagatgttctgtcacattccttgacaattctaaggcctcagtgtacccatctgaaggctggatgtaatgacaatccttttgtgaagagctcatgctgagcctcaaccttgccaggatgctagttgctaacatttatatatcctagatgccaggtatatgatatggattatctcctttaatactcaacagtaagcccctgattcttacagataagaacaaactgaggtttagagaagttaagtaacttgctgaaggtcacgcagtgactaagtgttaacacagggattcagtcccagaaaatggcctgaggacctgtacttcttacccacaaaatctactgacagggaattttggggacacttgttgggggcatttctttatgtgtaattgcctggggttttcaccaccacacccatagtaacccatccatcctggagcaacccagagaaattgccagtaaatctgatcttttcctccaagctctgaaaggaagaaaatgagacagtctcacagacctttggctcagtgggtaaactgatatatgcacccttcatttttcttatgagtcattgaagatcacaagtacattcaggaaccacatgtctcaggtgacaaagaaaaagtggaagatctttctccatacctgcagtaatatcatggggtacaacaggctgcatcaagagcaaaaactgtactcttcctctgcccagagacaggcaattctaactttctcctcttcttgttgttcctgttcttgttcttgttctcgttcttgttcttcttgttcttgttcttgttctcattcttgttctcctcctcctcctcttcttcttcttcttcctcctcctcctcctcttcttcttctcttcttcttcttcctcttcttccttctctctctctctctctctccaccatgggattaagttctagccacccctaatggtaacaagctcttttgattccttggtacttaatcatatctcacatacagtaggtacttaacaatatttaatatccaatatttcttggatataaaatgaaagaattcaatctgagaggctcctgccaactggatcaacaagctacctccagtccagagaggataaataatttgctcaaagctatggagcaagtcactctaagagctcaaggttgaatccagctctcctgggtctttgcactaccatgcactgcctcatgccaggtatagctaggagactgacatgagacatcgcagcttccaagtctattgatgagtcagggcataaaacaacccaaacccctcttcagtcttcaggatgcagctcagcagctcctgcactaggaatccccctctggccaccccagcaggtcggtcactccttcttgatgtccccatcattacgacatggatctccatcacagcgggtactacaggacattacatcttcttgctcatctgcctcaccttctgaactttgagttccttaatggcaaggaaccacatgttttgaggttttcccttcttatttatcttcatcatttagcacagggcctggcactgagtaggtgcagagtgtttgtagaatgaattactatgtaattatggagctagattgtgcagtataatttatacatgctataagaattacaggaatcttggtgcccttatgaactaatctttacttctgaaaccatcaagaaatcatccctttaacatttaattgcagagaatctttaaagttgctgcaaaaaaggcatcaaggaaaccaaaaaataatatttgctaacatttattgagtgtctactgcatactaggtatctttcatgcattatctcatttaatgtttacatcagtcctttgaggaaaacattattatcagcctcaacttatgactaaaggaatcaggacttccagagataaaagtgtattgcccaagctcattcagcaacaaaagatgatgttggggtatgaatccagataacctgaccttggagttggtgctctcaacactcctaatccctatctatccttgagaaatttataattagatgcagcaaataaaatgcaaatgtgtgaaagttcttgcttatctgttatctgtcacattctctggtctgtgggtttgtacaggtgagagaccacatctttctcaactttgtttccttcacactcagcattgtggctagtataccgtagatgttgaataaatattagaagactatgtggttgaatccctgtcccctaaggagagacaaattaagtcagacaaagtgagggctgctcatgatgacttgcagccagcatgtcaatcagtaaaggctctgatgagatgtgtatatgctggggggatggtttgggttaccagaacctccacaatatgctgccctcactaaccacagccagaaggtttccaagcaaaacacagatagtgcccacctcatctgtgtcaacttccctgtttaattcatgcttatctctttaaaccccttccctttgcagaagagaaacagattcaaaggcatgagatgacttgatcaaagtcagggagacagaggcagaacttgagcacagaactcttcacccccagtcctctgctcctcatctcctctgtagttatgcatgcaatttttacagatgcatgcactgtttattcattcctttcttcccatgttcactcattcatcagaagcccaagactggaccaattgtagaccttagaggtggaagtcagggcagttcaggtctttatgttgacaatctcaactggggtaatagagaaacacttatgctgttcttgtccaaagatagctatgaatcagcctttctagctagtctggcacccagtggtttatgtcctggtgctgccacagggtggctttctggatttggttagcagagaagaacctctcttctaagagtcttcagagaaagcgaccaagtttgtcctatccaagtatttgggatagtatagtataggtctggttgctgcatgcaattttccaagcaggacacctctccatgcttgaactctggataagacaattccagagccccttcagggctaccgctagggctgtctcaaactggatcactcccttgtttaggaccccactgtagctagtgcataagcattcttaggcttacacattgcaacttagcagggtacttgtcagttctccccagatagctctctccttactttaccgttgagtataaattctttagggtcaggtaccaattttaatcatctttatgttcctagcacatagcacagtgccagcatcacaggtgctcaataaatgatcaataaattaaattacaattactcagctaaataagagccaagagagtagaaagtactttcttcgcatatgaagaggcaaggacttattgaatctggcacctcaaagggtatcgggacctaaaagtgaacagggactacacagttaagtctaagagggggaagtcaaacaagtgaatggacaaatacacatcacagaacaagggtatctagcccaactggggaggtggaaacatggattgaagcatttattctacctttagaagttattgcacctctgcttttcactagtcacagaacaggtcactctgactcatctattctctccctcctcctcaacctgatcaatagcatccagttgcaggtagaccacctaggtgtggaggtgaagccaggaaatgcagctcctcctcatccaatgaaacaggcccagtcaataaccagcataagatctaacagccgggaatatttgtttgtacaatcagtctggggctcaaacccacaagtgtaactgggaaaatgccctagcctagtagtctgcccatccccaggacagatgcctaaggatgggtagtctgtgttttgcacaaagatacctagtggcaaggttaagcaggggtagaaatccaacctgcgttttaattgacaagccatgtgcctgactcaaggctgtgtcagctcaagaaaggcactatcagcctggccaagctctgcccttatttccagagggggcacgttgtacttaaggataccccgtaggctggcagaggccctgtctgtgtcacagcaaagcagctggttggctgggggtgggatagaaggcaacagcataaaccagacaacggcaccttcccaagctggagagcttggtaggaggcctgggtgaagcacccatgccaaaggaactgagctgcagtgttcaaaacccgactgagctgcactgtgtgcgcactgagggcagcgcaggggggaattcaactccacctcagatatttcttatcacgcacacctcacggttagctctgagctaaaaacaccgcctctagcctgggacaaacctgaacctgacccacaccaccacaccccccaccccccaagcctctggctaccttctcctttctaaaaaaataaccccccaggaagcgctccacgtgctgctggtgcgagcgccggcgcggcgcactaaatcatcgctggcgtccacatttcaaagcggagccggaggagtgccggtgatttctgggtgccacaccgatcactcccaagctctgatctatggattgttttgatttcctcctttgaactcttcctatcccgctccagcggcagacagagatactgaattaagcgacagacaagttggagacaatgagcgccgggggccccctccctcccccggctcccctcccccctcctccccgaaatttgcagacatctgctagctggagcccagcgttggagtcataaagaagagctggcaggagagtgatgtacagccctgggccctcccgagtgactggcgttaacctccaacggagagacgctcaccccgtttacgacggagccctttgttttacaccactcagcagaggtgccttggccatactgaagatttaaccaaattataatgaatgatcctcagcagcgctgtgcccctaattagaacaagtcgcacagacatattgtctccctgatttcctctgttccatttctcgcactctctttctctgctcaggacacatgggccccattaaacattctagtatttaatgtggttcctttaaattacttctcaagttttcgagttccatttagaattggattttactctttggactgtgtttttgatttggggctttgtacgtttcgtaaccgctctttttctccacctagtggagattttggacaccacttagtaatacacgcggctgcaggacaggcagccaagcctctgcggattggaaggtggtccactgggaccctccattcactggagacttcttttgcacttctcctggaggagaaagaagaacttgatgcaaacataggctgacattgtcgattttatgaccctcggtctgatcacctcatccccatcacaattaaaggggtgaggactttctaggtgtatcataatttatacttttgctataagagggaaaaacactttccttggcccatcctggaggtcagtgtaaaaagaatatatatttgaattcacttaagatgatcatggcctcaactctgtagaatccatgttctggagaaaaggagttttcgcctttaacaaagcagatatgaagacttacactttttacagaggttggcaacaaagacaaatcaaaagcatgcatcaggcagcccagtaagctgaaattctgtctttcttggtaacttgtatgtataaattttaccctatgtgtctggatttagaagcactacatacacacacccacacccagatagggatctagagggagagcactgaagagattccaggggaagatagcatcaaccacagccgctggctgggtctgtgtgaagacggattccacacccttcctgggttcataagcagcaactaagagttccttagattaggaatattctgggggaagcctctgagttggaagggttttttagatactctggttccccctacccccgccaccctatgccaggaagctctctaatacatgccggcagatgtccacgtggtctctgaagacaagacacctcaaccccccaagacagcctggggcatctgagagttgctccaaggcatgcagtggagccagaaaggcagaaaccctgagaatccatttgtgcaatcttggggaaggcattcaatgtctgtgatatctcactcattcaacaagtatttaccaggtcatggtctaggtgctgaagatacagcaggatgcaatttcttgatcgttccaattacctggatccatagcatggaaataatagctcaccttacaaatgggctcctgcttttgacacttgtaagtggtatacaactgacactatttctcttgattataatgatcagaaaggttgtctttatttacaggaaggtgtattccctatatcttgcaccctttggttttagttctacctcagcttcttcctcaatggcatgcatctctctcacaaatcctgtttgcatttccaggcagaatgttctctgatccttcagcctctcctcacaccacataatttcttgaactttcttcatcttaagcagtctatctctgagcacactctgattcatcaatgccattcccaaaatctgatgccccaaattgaatatgatactccagatatcatctgactaaaaatataatgagaacactccttcccatgagtacagaagatttctctgaatacttctgtctcttgttgcattggattgttagcaatcatatcacactcttggcttattctgagctggtggtcatggaaaagcctcagatatttttcacgtgatttcctgccaaggcgatgagccctcctctggtttttttgtcgcttgttttttgcatgtaaatgccagactttccattcaggcctgttcagttgtgtcttattgtttttgacccaacattccaacctgtcaggaccactctgggccctcattctgtcacctctggtattaactctccctctcagatgtgtgacatctacacctttgatcagtttgcctcctgaattttcatctaatgataaatcagacaggatcaaggttagagctgctggcactttgtaagaaacctccttgaaggttgatatccattgtcatgagttggacccatgcaccttcaagaagcaaggagcaggaacctggagcaggactctatgcacacccactcctatgacttcctttgacttccctctgatcccgccttcctcttcctccctcctgaaatccatgtctttgtctgcatcctcctctctaggtcttctccatgatctttctcacttctacccccatcctgtgtccacctgatccacgctgcttaacccttggtccctgggtgacaggtctggggtttgctggcactagtcctgcccatttctagactatttcacccagagtgtcagactttcgctcccagccaagcccttggcccaggccaatgtgtgacttctctccctaccaccctgatggggctcagcacctggtctgtgacatccattcaatactcaacactctttggattcagctgttgagacagctgcaaatacacaaaaccactgctctcatccaacccacatttcaccatcttaaccacaaggaaaccatgagagaaactgttaaccctaagctgaaatcaagacctgcaatgtttatggcagacacctgattcacaaacatagtaactttatcaaaaaaggaaatgaggttactttggaataacttgtgctcaatgaagtcatgttgctttcaactgaccactgcattccttcctaaatgctcactcaccatctgctttttaatgcatcctgcttctctgttgtcacctacctcaaatctacttgtctaaagtttccagaaacaatttcttttctttttatgaaaatcaggataatctctgaccagttcctgattctggcaccaccttctattctccacaattacttaaaagttactgactgtggctccccagccccaccggaaagttctttccacacctcgagatgtgagtcatcaggccagttcctgagacccaattaaatcagcttcttgccctcttcctatctgatctcctcagctttcttgagctctgagccagccaagacaccttgggctgcaaagagcagaaaccctaggctcaactggcttaaagtataaggaaaattggttgtctcatgaaatgagaggggctaggaagaggggcttcaagattgattacttcagtaggtggattgcatctccaagtatacttctctacccttttgttccaccatcctcaggtggtcaattgtcagttgaattccctcatattctcaaaacagtttttacagctccacctacgccatgcaaatacaacaacgtccagcaataaaaggacttctggtttcatgtgtcttctacttagaagaaaggacacattttcagaaacccaggcaggcggacaattcccctatctctttggtcagaagtaagtctcatgcccatccttaagccaatccatgatgaggagaatggaaccacagtgatcttctgggatcactgcatctcagacatgggggaggaatgttgacacattaaaaaatcaggcccgactggatgcagtggctcatgcctgtaatcccagcactttgggaggcagaggcaggtggatcatctgtggttaggatcttgagacctgcctggccaatatggtgaaaccctgtctctactaaaaatacaaaaattagacgcatgtggtggtgtgtgcctgtaatcccagctactgagttattagagtttattagaactctcttttattttattttatatatattttttgagacagagtcttgctctgccgcccaggccagagtgcagtggcacaaacatggctcactacagccttgacctcctgggctcaagtgatgctcctgcttcagcttcttgtgtagctaggaccaaaggtgcatcaccatgccaggctatttgttttattttttgtagaaacagggtctcgctttgttgcccagactggttgccttttaaaccgtccactccttccttccattgccagatgagcatgatcccagcacatgtccaattctctgaaatcatacttgcttcttcatgttacatgtcaagtttgccttgtgcagactcccgaacacctctgtttcactgttacctttgctggagagcctggctcagaggttttgctatgcctcatgcattcagcttatggatcatctctctatcttgtttacactttctcttacttcatcacattgacccacgtttaaagccaagttcttatacttattttctacacgaaaatactcacgcgaggtatttctaagcacaacagaaaaacaactacatatgaacgtgaagcatcttcatttcaaaagtccttcatctaccctgccataatgttgtactgtcctctgtctaccttctgctctcatccccactctcttccacttgctgcaaattcctgttttttattaacatacagaggttttagctgattctttttttcccttgaagcatgctagattatttctactgcaccctaccttcaattgcaaactgcttatcgagggattttcctgatcaaaacagttcctttcttaagaggacttctggttcaagacgtcagaaagttttcattcattcatatcattcataccttttatcttagcttttttttcttagtttaaagagttttgatcagataggcaagtttcctctcatatatgttgttgtttttataacaggcactcttgttaccataagcatggtcccagataccaaacgctattttatttcatttttttgtaaaggtctctgtttctttgcaattgaaagcaccaatttcaggagagaaaagaagagagaaatagagatgaatatgccttcaagttgtcctgttttttaatctacagtattaaaacatccaaatagtcatggtcgtgtagacctctgctcactgcaccagtgacttcagggaactcaccaaaagcaggtagcgactggtaggtcttcaagatgactcttggcaggttattcaacatgcctggtgcacacattaaagacagaatactttccagtgaagttgctgcagctctacccacagaaaattccacattgcctctcaggaggagagtgctcattcccgtaatacatctgtccctccctggagcgagggggctccttccactagcttatgcctgttagcatgatggtgggtgagtcttgagttgagatttcttcaaaacatctagaactaccctctttaatactataccctggtgtaacaggcccgggtagagaggcagtctgaggccagactgagggtgtaatcagatttcaccatggtacagggaaaaattatgtcaagatccaaaaaatggcaccagaagtgggccactaggtcaataatgattgtattcattcacagagggtacccagggtcattccagaagggggtcattggactaggaaataaatcaggaatcttggccaggtgcaatgactcacacctgtaatcccaacacttcgggagtccaaggcagaaggatggcttgagcccaggagttcaagaccagcctgagcaacataatgagaccctgtctctacaacaaatttttaaaaattagccaggtgttgtggcacacacctgtggcccaagctacttggacctgaggctgagatggagcattgcttgagcccaggaggtcgaggctgcaatgagctatgatcacaccactgcactccagcccaggcaacagagcaagaccctgtctcaaaaaaaaaaaaaaagaaaaaaagaagaagaagaaaagaaaagaaaaaatcagaaatcttaagttcgaagcagaaggccacaaaaggaatgaggacccaaggattgatacaaatgcaggaagtcactatacctattgagaagtccagattattttatcacaccttttgtttgctgccagagtggattctagttgaccacctggagacatcatggcttctctacccaagaaatgtaccccaaagccccctttcaactgagggactgtgtgcctacacagtgcatgtttagggtggattctgcttctttttctcccctaggtcacattcttatactatcctgattcttgacctttttaacaaagtcccagctggtgcctaagttgtgtctgtagctaggactcaaacatgcatccaggatgctctagagtcctacctggagtttacttattcacatccaaagctgagggggactcctaagaaataactcacccaacaagaacaggaagttggacagaggagcaggacctaaacaaatccttatgctcggaggaagtgtggctctgactgtagaatagcatctgcctcttggatttgtctccttgccagcctccctcataggctcatgcctagatcctaggaaatgataggctttgaataaaaaatttaaaaaaaaatgttgctgaaattctgcatgaaagcagggctcttgtcacaaagcataaaaaaatcaatctccctctccttccccttgtaatccagctcacaacagtattttccatacccagaaagatgaatcaatggaggtcaatggtaggcagcctcaagatagatcccagtgatcccccatctcctgataatcacacttttgagtagtcccctctcacactgtatcagggttagtctgtgtgaccaatgggacatagcagaagttatggtttgtcatttccaaaaccaaaaggtgctgaagcttcatatttgctctccctgacccactcactctgggtgaagtcagctgccatgttaaaaggacgcatttggaactctgtaaagaagtccatgtggtgagaaactgaggcctcctgccagtagccctttaggaactgagtcctctagccaacagccatgtgaatgagccattgtggaagtggttcctccaggcctggccaacatcttgactgcaacctcatgagagaccctgagtcagaaccctcccactaagctatttttggattccttggcccttaactggtgagattaaaatgtgggtttaggggcagggggggcaatttgttatgcatcaatagatacagattttggtaccagaagtgaggtgctgtcaaaagtaatatctagaaatgtaggcgtggctttagaaccaagcaataagcagaaaatagaaggatatcgaggacagtgttagcgaaggcctgaagagcttcaacaaaactgctggtggatgcatgattatctttgaggaggcttcagatgagagcataaaggaaattgaggaaaaacttactggaaagtagaagaaaggagggtccttgttgtattgtggcaaaaagtttagcaacactgtcacctgtacttaatgaactggatctagctaaagagattactaagctatgtgttaaaggtgccacctggtttcttgctgcttagagtaaaatgtgaggggagacagataagctaaaagaaggactgctacacatggaggtgccagcacttgatagtcttaaaatttttcaacctcccaagatggcaatcaaagctaaaattaagaaatgacttcctgggcaggtgcggtggctcacacctataatcccagcactttgggaggccaaggcaggtgcatcacaaggtcaggagtttgagaccagcctggccaacatggcgaaaccctgtctctactaaaaatacaaaaattagccaggcatggtggtgggcgcctgtaatcccagctacccgggatgctgaggcaggagaatggcttgaaccctggaggcagaggttgcagtgagccaaggtcatgccattgcactccagcctgggcaacaagagcaagactctgcctccaaaaaaaaaaaaaaaaaaaaaaaaaaaaggcttcctaacttggtaatatattgaaggaaaaaataaataaaaagaaatgtcttccatccatgatcactttcaggacactgcaggaaaaaatggtcagaagatgaagccaagagtctagcagttaaagccctttgttaagacctcggaaggctctaaggtaatatttcagagtactattcaatcagacaaaacacctctaaaaaatgtgtgtgtacctcacagatactctcaaataatagagattctaagaagcttaatgtccctcagccattttagcagaagaccatgagtttacctcaaagacatttctaggtatgacttttgtttaatggaatgactccaacatgtttcagaagagactcacaaactttttaagaaaattatatttgcagaaacaccactggcttagacagtaacagtacaaaatggaaaacaactttgaaccttcctcccccaaccccaccacctcctacaaataaaacctggtgtgaaataagctgagaaaactacacagtcgtagacaagactacttctcatggaaaaggaaaagggactcagagggcaaactaagaccccagatggcaaggcaaagagccatgaaaagttatttccagtcaggagtaaatcaagtcttaatcagagaacttccaacatttttctaagtgtatttcagacattctatggactggtgacttttatgcctcccattttccacatttttgaacataaatgtctatagtgattatcctatgcccattccatcattacattttaagtgtgtgtgttcacaggtcttccttaaagagctgaatttaaggaattacacctgaggcatctcatcagctcctaaattagatgaaaaatgttggaactcgctctgatgctgtgatgaaatgatatttgggtgtccttgggagatgagtgagtgtattttgcatgtggggggaatataaatcattagtggacagagggtggatggtgcttgtttttaaatgttcacagattgtttgtacacctccctccaagtacatagtggtacacagtagacaagtacatagtagacatagtagtacatagtagacatagtagtacatagtagacaagtatatagtagacatagtagagtacatagcagacaagtacatagtagacatagtagtacaaggtagacaagtacatagtagatgcagcagcaagtagcaagtacatagtagacatagtagcaagtagcaagtacatagtagacatagtaggaagtacatagcagacaccctgctgagggttgtcagctgtccctacagcagagtggaggtaaggtagtccagtggttaagaacacgggtgttgcaatcaagcagaactgggtgagaatcaggctctgacactccttagccctgtgaccctaggcaagtgacttcctttctctgtgcctccatttccacatccataaaagggataatcctcaccttttcaggattattgtgaggattcaataaaatactgtatttaaattacttggagtagggctgggcatggtggcttatgcctgtaatcccagcactttgagaggccaaggcgggcagatcacttgaggccaggagtttgagaccagcctggccagtgtggcgaaaccccatctctactaaaaaaaatacaaaaattggccaggcatggtggcatacacctgtaatcccagctactcaggaggctgaggcacaagaatcacttgaacccaggaggtggaggtcgcagtgagccaagatcgcgccactgcactccagcctgagagacagagcgagactccatctcaaaaaaaaaaaaaaaaaaaaaattacttggagtaggctctgaaacacagtaaatgctcagtaaatagaagataccattaatacatggccgtgtgaagttacagaaagaacaagggagccaggttcaggttccaccatgtgaggttataatgaggattagatatgatgtgcccagcacatacaaagcagttcgtaactgttcactttcttagtgtccactctctctaacaatgctgtggttcatacacacaggttgcacctaataaactccttccatatttccaggttttcaaactacatggaaacaaacagcatagataatattctcttcctggttccatgtatgtctgtgcatttctatgctaaatagcaccacaaagacacactatagtataatactgatagaaaagaggccgggcaccgtgattcacacctgtaatcccagcactttgggaggctgaggcaggcaggcggatcacctgaggtcaggagttcgagatcagactggccaacatagtgaaaccctgtctctactaaaaatgcaaaaaattagccaggcgtggtggcacacgcttgtagtcccaactacctaggaggctgaggcaagagaatcgcttgaacccaggaggcagaagttgcagtgagccaagatcgagccactgcactccagtctgtgcaacagagtgaaaccctgtctcaaaaaaaaaaaaaggaaagaaaggaagaaagaaagaaagaaagaaagaaagaaagaaagaaagaaagaaagaaagaagaaagaaagaaagaaagaaagaaagaaagaaagaaagaaagaaagaaagaaagaaagaaagaaagaaaaagaaaagaaagccgagaggccaactaatccaacacacccctacccacccatttcacagaggagaaagttgaggtcctaaaggagtaaaggatgtgagaaagtcccacatctagtgagtggccatgtcaggtcagccttgacccctgcctctcaactcccaggcttgtgctctttcctttctagcagtagagtgctgaacttgctgtttgcccatgcatttggggttgggacaggggaatggacattgagaaagggattgctttaattaacatagacacagaggaggcatgggctgggcaggtgatgtggcaggggggagtttcagaagggatttccaggtcactgactgtgccaggctccaagttccagatgctttttgtcataggggcccgtccacatgacatccgccaccgtggcacaggctggaggacatgccctgcctgaccaacattttaggggctggaagacgagaggaatcttcctggagagaggctggattctgttcctagctgcactggggattgacgaggaagctaacttgaaaggtaaggtggtataccagaaagctcgtcagacaaaaattcagttaagctttggttctgctcctgtcttattgtgtgaccttgaatctttcccttaacctctcagagcctcagtttcctcagttatattaagtatcacagcacctgctattccacctactcacaattgtgggaaaactctaatctaacccactaattagatagataaggagctcacaaatccatttgtatacaatcctggacatgggtgagataataataaaaggtggtttgcacatcctggtgtctaggaattaaggtacatgaaattacccaaccacacaccgcttcctgagtccagaggctggagagatttcagcagcctccatttcagggccagtgggattcttgaagacaaagggaaaaatgttctcaattcctttgtcgagagacttacgtcaacagatgtcccagatagagacactcaggatgcgtaatggaatagtgcccacaaggaataggggcccagggagccctcaaagctccaagtcctggtcctgcacatggagctccggagagaggccaggacggaggctgggatccagggcaggaacatgtggaggaggaaaggcgaattggccagctctggggagacatcccaaacatccggaacccattgctcaagcagggcactgggctccagaggcatgctgagcggaagatggtggggttttgttttatttttggattttgccaaatcaaaagaattcaagaaattgcgggaactgttgtgttgaaatgcagacactgccagggttggcacaggcctgtttataagtaattcagtctgaagcagggaggagctgcaagcgtgcacacatgcacactcacacacactcgcacacacatactgcctgcacaggccagtggccacaggaggcctgatcttcccttggtggctcctgaggggttggccaacacacgcgggctccaggccaatgttcattcatctgtgcactcctgtattcactgagtgcctacgacgcagcaggcaagtcagaagctcacagatggtgtggggagcagaggcggcccctcccttcccagtactgacgttcctcagggccatacaatggtaggggatgcaggtcccccctttttatctgagcctaagtagagaagagtaggcgatgggctagggaaggagagcaaagggtaaggagacatgtagcagacactggtggctccccacctatcacccatccatacttcctgcttttgctcttgctcaggcagcagtcagggatcccttgatcttggggagaggagacaccttcccagtcttaggggatgcatcataacaggtccaaaataattgtggtcacctcattacctttggttagtaattggcctgaaggtctacacatgtgacccagttttagctaaaaagctataagaattctcctgggagagctaagctcttttgcccttcccctttcttcttactagaacatggacataagggtcagaggtgtcaaatccatttgaaaaccaagaggcaacatgtcaacaagctaagatggcaggactaagagaaagagcccgcatgtttgacagcaccgagccattgcaccagagttggaatgcctgccttcagacattcatcaggtgagaccaaatagaaatctatatttatactatacatttattaaataaatatctatttatataatgtctatttataaataatatatatatttttgtctcatctgatgagtgtctaaaggcaggcagtccagctctggctcagtgtgtcaaacacacaggctgtttctcttagttctgacatatatatacagatagatagatagatagacagacagacagatagatagatagacagacagacagatagatagatataaaatgccctatttgttgaagctgcttttaattgggtttttccgttacttacagctgagaatattcctaaagcatctgagagaggatgttactagtattatcatgagaaagccatgttgcagggcataaacaggcccccgctccaagaagagccattggaaagagctgggaaacaaagagctcaaccacacttttttttttttttttttttgagacggagtttcgctcttgttgcccaggctgcagtgcaatgacgctatctcagctcaccgcaacctccgcctcccaggttcaagtgattctcctgcctcagcctccctagtagctgggattacaggcatgtgccaccatgcccagctaattttgtatttttagtagagacggggtttctccatgttggtcaggctggtcttgaactcccgacctcaggagatccgcccacctcggcctcccaaagtgctgggattacaggcatgagccaccgcgcccggccaaccacacttcttttttaaacgaagtggtctcctgggtgatctgttctctattaggtgctaaaggtatgtatggtgctaagggtatgtataccaccccttcccactggagggactttagcaccaaaattccttcctgaagaggacttactaaatcattccaaccccaatttcttgttcttcaatacaagttggtattataattgcatttggaggaatcagtaagttgggactttaaatcctgtgtgtgtttgtgtgtgtgtgtgtgtgtgtgtgtgtgtgtgtgaaagagagagagagaagaaagttgctgtttaaaaattgctattgcttcatgtctaataacggcattcaacaactgccagggttcaaatctagctactccctaaccatatgaaattaagttgtaaaacctatatgtgcctcacttttctcatctgtaatagcttctacttcatagagttaatgtgaggagtaaatagattaattcttatttagaattaagtcttagaacaagtgcccagcacatgatagatccccaagaaatattacctaatgttttcattgattctgagatgcacataggtttgtcttagggtgtttgttttgttttgttttgttttgtgttttggagacagggtctccctctgtcactcaggctgcagtgcaatggcacaattatagctcactatagcctcaacttcccaggctcaggcaatcatctcacctcagcctcctgagtagctgcaaccacaggcatgaactaccatgccaagctaccttttttttttttttttttttttttgtagagacagggtctctctatgttgcccaggctggtctcgaactcctggcctcaagtgatccacaagcctcagcctcccaaagtgctgggattataggcataagccaccacacccagactatttttttagacattgattttgaattttattccagtatttaaatttctaaaatacattaatgtgttaagtggaaatcaagaacatttaactgcctgttgatgaatgagcagagaaaatctggtgtctacaaagcatccagataagtatataagtacaacttacgcacacactttacattcagcattgtgacaggcactttcaaaacctcctcacggttgacttacagctcattgggccccctttttgtaactccacagaactttcagggattttgttctttccaacttttattttaggtctgggggtacatgtacaagtttggtttataggcaaattgcgtgtcatggggatttggtgtacagattatttcctcacacaggtaataagcattgtatttgatagtttttcagtcctcaccctcctcccaacctccaccctcgggtaggccccagtgtccattgttcccttgattgtgtccatgtgtactcaacatttagctctcacttatacgtgagaatatgtagtatttggttttctgttcctgcaataattcacttagaataatggcctgcagctccttccatgttactgcaaaggacatgatctcatcctttttcatagctgcatagtattacatggtatatatgtaccatattttctttatccagtccaccattggtgggcatttagattgcttccatgtatttgctgttctgaatagttcagctcatatttttaccatccctcaaaccatgatgtttttcagagaatagtatgtgtcataggtaactggaatcatttttttctgggtgatttgcttttacaacctgcaatatccttgatctgacaaagtgtggaattattattggagcagatctccttgctgtgaaaagggccacttatgtagtcctgtagacataaagatatataaagcaaataggcacctcattgtcactggggaaggagttttgaaggtttgtcaaaggccaccctatcccataccttttgtttgtggagctcaaaggctctggtgaaggaacgggtaaatttgtgtagcagatcagcagatccaaatggaaatcaatgctttttaaagactttacttttttagagaaattttaggttcacaacaaaattgagagaaaggtgcagagacttcctctataccccctgcccccacacatgtttagaccctcccactatcaacatccctcaccacagtgaagcattcattacaatcaatgaacctacattgacacatcattctcacccagagtccacagtctacatgaaggttcactcttggtgtacattctgtgggctctgataaatacataatgatatgtatccaccattaccatatcatactgaatagtttcactggcctaaaaatcctctgtgctctgcctagtcatccttccccctcccctaacccctggcaaccaatgatcttttcactgtctccagagttgcgcctttcccagaatgtcatgtagttggaatcctacagtatgtagccttttcagtttggcttctctcccttagtagtatgcatttaaggttactccatgtctttctgtggcttgatagctcatttctttttagcgatgaataatattccactgtctggatgtaccccagtttatttatccattcacctcctgaaggacatcttggttgcttccaagttttgtcaattttgaataaagctgctgcaaacatttgtgtgcaagtttttgtgtggacataagttttcaattcatttagttaaaaaccaaggagtgtggttgctggatcgcatggtaagagtatgtttagttttgtaagaaactgccaaaccatcttccaaagtggctatactattttgcattcccaccagcaatgaatgaaagttcctgtcactccacatcctcaccagcatttggtgttatcagtgttttggatttccgccattctaataggtatgtagtggcatctcattgtcatttcaatttgcatttccctgatgacatataatgcagagcctttttgtatgtgcttatttgccatctgtatatcttctttgatggggtgtctgttaaagtctttggaccattttttaatcaggttgtttgcttttttattgctgagttttaagtgttctttgtatattttgaataacattcctttatcagatgtgtctcttgcaaatattttctcccagtttgtgacttgtcttctctttctttagacattgtctttcacagagcagaagtttttaattttaatgaaagccagcttatctgttacttatttcacagatcatgcttttattgtggtatctaaaaagtcatcaccatactcaaggttatctagattttattctgtgttaccttccaggagttttataattttatattttacattgagatctaggatccaatttgagttaattttttatgaagagtgggaggcctctcactagtttcagtttcttgcatgtgggtgtccagttttccagcatcatttgttgaaaaggctattagatcaatgcttttggattttagattattcaaaaacctaaagaattgaggttgtacagtgaggtcacttgagcagaaaggacatgaaggccctcccaagaaggagcagaaaaacgtgccgtgactttgactagagccggagctgagaatgtcaggtggagattcattgctccagcaactaacgtggcaaaggtggacccaggacagctagggcctcaccagcttcctggtggcacacctgcatctgatagaatccccagtgggactggatctaatatgaataagcatttggagggttgcaactataagttgaaactccatcattcctcttcagttcaatgtgggagcgtagacaccaggaaggaaaggcaatcttctgatggagagacagggttatgatcagtttcagcttgaataacacaggaagcgtgggcttattttttagcttaagcacgtgaagcaagttatatgaatgaaactattattaattaataattattatttacaatatgacattattaccagtagcagccgacacttatcaagtactactatgtgtggagcactggactatgcacgttgtgtagattatcacatttactctacagagctaggaagtagcagcaacgactcatttgacagctgaggaaatgagacccaaagaggtcaattaagttttctatagtcactctgccagcatgcaacagggctcaggttcaaactcaacttgtctcactccagagcctgagttaatcactattcatgtttgaaaatagagtttcttcttcttcttcttcttcttcttcttcttcttcttcttcttcttcttcttcttcttcttcttcttcctcttcttcttcttcttctttttgaaacagagtttcgctcttattgcctaagcaacctctgcctcctgggttcaagcgattctcctgcctcagcctcccgagtagctgggattataggcatgcatcaccacgcccagctaattttgtattttttgtagagatggggtttctccatgttggtcaggctggtctcaaactcccgacctcaagtgatctgcccacctcagcctcccaaagtgctaggattacaggcatgagccactgagcccgaccaaatttcttcttttaatagcagtgtttcagctggtttctgactgcaaagttggctgggtgtgtgtggcttctccctctgcctgtagaaactccatcattcctctttagttcaatgagggttatccaggatttgctggatactacgttctctgcctcaatgctcccttgccagatggccttccttcagcagtatattagtcaagttgggctgccagaacaaaataccatagattgggtggcctagacaacagaaatttatttcctgacagtctggaggctggaaagccaagacgaaagtctggcaaagttcggatcctggtgaggactctccacctggcctgcagacagctgccttctctctgggtcctcacatggcaggagaggggaagatttcttgctcttcctctttttataaggccacagtcctattaaattagggtaccacctcatttaaccttaattatgtcctaaagatcttatcttaagatatagtcacattgggggttagggctttaacttatgaatttggaggggacacaatttagtccacagcaagcagttactttttttttcttttttcttttttctttttttttttttttgagacagggcctcactctgtcacccaggctacagtgcagtggcatgatcgcggctcactgtagccttgacctccccagctcaagcaaccttcctgcctcagccttacaagtagctgagactacaggagggcaccaccatgcccagctaatttttttattttttgtagaaacagagtctccctatgttgcccaggctggtcttggactcctgagctcaagcaatcctcctacctcagcctcccaaagtgcccaggccagagcacagtagtgtgatctcgacttactgcttgtgcctcctgggctcaattgatcgtcccacctcagcctcccaaagtgctgagattacaggcaggacccactgcacctggccaatttactctttttttttttttttgagacagggtctcactctgtcacccaggccagagtacagtagtgcaatctcaacttactgcctctgcctcctgggctcaagtgatcatcccacctcagccttctgagtagcggaaagtacaggcacgtgccaccatgcttgtctaatttttgtatttttttagagatggggttttgttatgttgcctagactaaggttattcttatattctttaaaagaatgaaattttccatgaatgtctactctcaggtatctcgatgaccacagactttagatcttagaagcatcttagaggaaatcaagcctaaattcttctttattttacaaattaatacatgtgattccgagacattaggggatttgcctggagccatacagctggttaatggcagagctgaaactagaacaaggtcttctgattccagtggtgcagtggcaccattgcaaggtcttggaggaacaatgatggtgatgatgattcaagaccctactgtttgacaggcatagtatgacttattttatacacaccaccttatttattcttcacaatagcctggtataatgggtactattatccacccatatagatgaggaaacaggctcagagaatgagataccttactcaaattcacacagctagttggtaaggggggcctggatccaaattctgtgctcctttgatttcactatgctctatttccaccgaggaagtgggttccctggtggggccagggaggtggctctatggctatgagccaagattttaggccaagtcaaggtcatggactcttgggatcagccctggggccaacaggctgccagaagtgacagaacgaagaaaggaaaggaaggagagaaacaggagacaaatcttgatggcttccccatattgccattgtcctacttggggagttccaccttcatctgttttaccctttttttcctttaccttcgagctctacgtctctttatcagtaaactagccttgcagacaagtgcaaactgtgccagcccttaggctgcaaaggaaatgaagttggcattctgtagtcctcacctggcatgaatcacacacagccccaagggaccgggacaaggctacatgtcagactgatggactattgtctggagctttgagagaggaaaaagggaaggctgcttgcaggagaaaggtgaacaggttggccccggcccaagaatgacagaggcgccttgctcctgccacccggctctgctcctctggcccaggaacaataacaaggcgctgtcaggaagtgacactaaaatgcctttccccttatacctcgttcagcctctggcaaaaggaggttcccggagggaatatttttagtttgacaaatgaaagcctgggaccgaggacaggagggataaagggagctcttctctgacactcctggagacggggagatgatgagtcagatacagagggcttaggcacgacttctcaagacattcctcaggcatgagcacaagccagccgctcgaattcctcctgcaaggcccgccacccggcaatcagggcggaggggccgggccagaggagcagctctgctctgtcttcctcttggcacattgttggacagcagctttggaagatcaaagcagccgcctgtgttgctttccggaactgggactcaggaggcctgggttcaagtccaggcttcaccatttgccggctgtgacattaagtgtcctcatttctccctttatgcctcagtttcctcatcaccaaattgagagtattataacaccttggaattattattatgaggttgtacatttggaaaaaaaaaccttgagaatgcagtgtttaaaagcattggttttctgtattgctcccagtaccccatatgcagatggactcaaaatctcacactggtggccacgtgcagtggctcacgcctgtaatcccagcactttgggaggcaaaggtgggtggatcacctgaggtcaggagttcgagaccagtgtggccaacatggtgaaaccctgtctccaccaaaaatacaaaaattagccaggcatgataaataggtgcacgcctgtaatcccagctactggggaggctgaggcacgagaatagcttaaacctgggaggcagtggttgcagtgagccgagattgcaccacggcaccccaggctgggcaacagagcgagatttggtcaaaaaaaaaatctcacactggtaacaataataaccagtacctattgagtgcttcttacttaccaggcttgtgccaacttctctcacatccaaccctctcaatagttctgtgaggtagatctaatcgtttccaccttctagacaagtatactgaggctcagagaggtggcatgggctgcctaaggtcacagagctaacagatggtaggctgacattagactccagctcccccaactctgaagcccacttttcttttttttttttttaattattattatactttaagttttagggtacatgtgcacaacgtgcaggtttgttacatatgtatacatgtgccatgttggtgtgctgcacccattaactcgtcatttagcattaggtatatctcctaatgttatccctcccccctcccaccaccccacaacagtccccggtgtgtgatgttccccttcctgtgtccgtgtgttctcattgctcagtttccacctatgagtaagaacatgcggtgtttggttttttgtccttgcaatagtttgctgagaatgatggtttccagcttcatccatgtccctacaaaggacatgaactcatcattttttatggaagcccacttttcaaatccctgtgctgggaaccctcagcctgggcctgtacccagcaggagaacaagatcaaggcagtgcgctgggccaggcacgaactggggagccagagggaggggaaggagcagaacagataaagaaatcggaggcggagccagggttcagatgcagagcagcaagttgaaggagcagggaaagcaccaggggctggagcctggaaccctggcagctgtccacacttggtacaaacatgcttacggcaatatggtggattgctggggcagggaagggggggtgcacttaaaagtcagaatccgctcatctgattggaagagagaatgaggcaactaaccatctgtagataggcttatttctcactttttaaacagctggtttgggtgggtgctcctagggactcagcgcaaagtcattgggtgaattctacccaaaatatgtaaagccatgatgagcaacccaccccacaggccacacgtggcccacctagtgtcattgggtccatgatttaatttggggatgaatagtaagaggccatcaacgtgtactgcctctcaaaaaattctgatagtgatgatatttcttgttgttaaattcagtgttacttcactcattagcatccttctcttacgtaagtgatctaactctcgagaaatcacttttaatcccctcgtaggacttgatacagttattttgttttaagcagaaaacaaaagatggctcttaaagtcaattattgtcttctttaattcaccctcaggaaggaaggagagggtgagaaagggaggaaggaggtaggggggaagaagagaggcaggcaggctaccactgatgttgagtctcaacatcctcaaactgcagaccatgaactcttttctctgtgcactcataggaaggtcatcctactgcctcctcggccaagctaaaacccaagagacttctcaccattcctctctctccttctcccagggatatcacccccagcatcactgctagggcttaggatatcactagtattcccaacatcactcagtgtctccctagaagacctgtgaggagtctcctctcagacctcagtgtcaaggcaaacagcaagtggctgcttttacccggtaggtgatgtgagcgagcgtgttagagggtcatgtcctcatgtttgcgttggtcactgaaaatgttgagagtggattttgcatctttcctttcaggatctcacaatgtgaatgtaggttctcctgcaagtgtccccactgacaagacatgggaccttgggcaagtcatttaaactctgtgaaccttatctgtaaaagagagttaattaccacttgcctcatacggcagatgtggaagtgaaatttagatgatagataatagatagatagatgatagatagatagatagatagatagatagatagatagatagatcacatgtgcctagcatataataggtcatcaataaatgataggtggtgttactattatccacagcagcaccctgacacactatgtatactaaattttcttttttttttttttttttttttgagatggagtctcgctctgtcacccacactggagtgcagtggtgccatcttggctcactgcaagctccgtctcccggattcacaccattctcctgcctcagcctcccaagtagctgggactacaggcgcccgccaccacgcccagctaattttttgtatttttggtagagatggggtttcaccgtgttagcaaggatggtctcaatctcctgacctagtgatccacccacctggtcctcccaaagtgctgggattacaggcgtgagccactgtgcccgaccactaaattttcttttactgcatttcattcaactacctttctttttctatttcacagaatctctatctttttacttttcatcttatggtagtatgtgtttgtgaggtttgtgggagggagttgcaatccaccttaatattgtggagcagagcaggtcaaaaaaaccaaacaactgtaatactaaaatgaggactgtttttcccagactctgcagctaggttgaagttgttgtcaagctctttgactgcagaatctcttgaatattaaggaaggtggggcatgggggtaggtgtggaaaggacaccagtgaggaaagagggatcttgcttgggatgcaagattgagacctacaggaagtagggaacctttgccatgccagggcacttccaggagctgatggcttggtcttcctttcgatagccactgaccaggttctctcatggggacatggtctcagcgaccagcttttcctgcatgtgctgttctcctgctcccagctggcccaccctctcttccatctgtatgcttctgttttcttatggtttctacagcctgcttcttgggttccagagggcccagggggctatgacaccctgtctgtgtgtcataaaccttcagcttcagccacctctgccaccggcctccttctcctatcatttcctaggtcaaattctctaaggaagaaatatgatggcatacactcatccttctctgaacctgtgtcctaatggtggactctataagggatgccactgagtcccacccttggggattctatggggccaaagagttgggatggggacagaacatggagtaatcagccacctatttggctgccccttgagcagggatatgagagatatggctttcccctaacagggaggccccgtggttgacatgtggggataccttggcactcccaagtggccttcctgcagtctccacctgtacttacgctttgccctcagggtctagacttgggacacaaatcccagccccaccactgaccagctgctttgtttcaagcaagaattctttccgactctcagatttcgtatctgtgaatagtgatcctcatagtatcaacctcaaagggttgtgatgtggagtaaataagattatcggaacacagcctaaaacatagcaaacactcaacacctacaagttgctatttattgcgattgccattaatacaattcagagttgggtagaatcagctcaaatcccatttgagaactctttaagcctcagtttctacatctatgccaaggtacttctaacaccttccttgcaggactggtgcaaatgctaatgtatgcagcgatctcaagcagtacctggtagacactaatattaacaaatgcttactcttttctccctcattctttatgaggtgccccttgactgttttcctaaaaagccattctcctccccataaggtacctctagaagtatcctataaagagctcatccctttggctcttggaaccaatcattggctaaaaactcatcctcaagaagccataagatggtagaataggtaggaaacttggagtcccactgaccttatcatttacagatgggggaaactgaggccaatgataagaggtaatagacccatgtgagaaaggggccaacccagaaacaagaccctgcctctcctgattcccagtccaatgtttatgccacactttatttgccctcagtagatttctccatctgaagttccctttctctagtcatcaaatacactcacgcccacacttgtgctagcagaaccatccctgtgaagaattaaaagcaaagactttgaggcaaactgaaaggggaaagaaaaacagccccagagacggcgggaaagcagcaacaagcaggcccacagccttgtccctcacagagccaagcccatggcttagctataacaagagtgacttgggagttattaaggaaaggagcctttaaaccacgacgtcataagaatggcgggtgtctgtgggccttgaaagagaaaggggattaggccagtgtttaaggctgagccgttacggccttgaggtccccaaagcagaccacctgccctgcctaagaaatgttcaccaaagcaccaacatgagaaatgaatgtttaaatttgacattattaaaaaccatcagctccaatttcaaaggctgacaaggctgcccctgctcccctacccacccaggcccagcccatcccaccagaacaactaacccgtgacatcagagcctgccctggggagatagtctggtaaattagcactatctacagaggcggaggatggagttacaacctcatcaactggggagaattcgggactccctggcttagctcacactcccagttgcttgtcacaatgcctatgcccagaacttctgggtcttgacagcaaatctcttgcctcctacactcctacagagtgggatcccaagccccagagaggaggtcaaaggcatccatggggaaggcaggtgggttcccagccactagccctctcaatcccacttgctaaaatagctcagaacttgctctccctttcatccaggggtccccaacttgggctaaacttgggatgctgcccaggtccagaatcttgacactggtgttttttcaaaccgcccccccccgcaggagacagcagtgagcagccatggtgggagcctcttctgcagtcaatccacccttcacactgcagccagactgttctctccaaagcacggatctgttaacacatccaaggggagggaccccaactccttcccttggggtccaatttccttctccactgacctagtcctccacttctgccccatctgctttcactcctccttacactctagtcattggcctggttttttttttttttttttccgtctttttttttaattgagactggctctggctctgttacccaggctggagtgcaatggtgcgatctcggctcactgcaacctccgcctcccaggtttaagcgattctcccacctcagtctcccgagtagctgggaccacaggcgtacaccaccacacccatctatttttttgtatttttagaagaaatgaggttttgccatgttgccccggctggtctcaaactcctgagctcaagccatctgcccgccgcagcctcccaaagtactaggattacaggcgtgacccacctagcttggttggatcttcattttctttctttttttttttttttctttttgagatggagtttcactgtattgcccaggctggagtgcagtggcgctatcttggctcactgcaaactctgccccctgggttcaagtgattctcctgcctcagcctcccgaatagctgggattacaggtgcccaccgccactcctggctaattttttttgtttttaatagaaacgaggtttccccacgttggccaggctggtctcaaattcctgacctcaggtgatccaccctccttggctcccaaagtaccataattgcaggcctgagccactgcgaccaggctggatgttcattttctaaacaaaccacctcttttgactttggggctccaactattccatctgcctggaatgccgaaccttgctcccacccatacctaggaaagttttccttaactttcaatgctcaacatgaatgtctctcttgccccacaccgtattcattgtttcctggtgatagtcaaaacccatccttcaatagcattcaccatgaggtagttgccacataaatggtaattttacatattttaattcatttcatcctcaccacaacacttcaaggtaagtattagtatcatccacactttacagatgagtaaacagaggcaaggagacatgaaattacttgctcaagatcacacggctaatgactgatgaaggaaggcttgaaccccagcctcctgggtccagaatccactgtgctataggccaccgcatagtgctaccttttcttttcttcctcgattgtagagaaatagagaaaaaagaaaaaccaaaaaggaaatcttacccaccaaacaccaagctccttgaatgcaggagttgtcttttattattataagtattacaatagtctaagtattattattcagtattattaatagatcactacattagtagaaattacaattactctcacatatgtatggattattctctctgtgtgtgtaaatgcattatcttctctataactcaacaaccacaggaggacgtgtattatttttactttataaataatctgatttatctataggctttgtgaagttaacacccaaagtcacccacccctaccctaaattctccactacttagcacagtcaagatgcaaagtcaagactcaatgatctgtttgattaatctgagtgtctcattgtaggcctctacatttgagttctaatacaacctattaatacaagattgcaacttccaataactaggagctattacctccctactatgtgccaggagttgtgctgagggctccattggcatcaatttgtttattctcaaaacccactggggcagggcccattgtttgactcatttttcagatgtctcacagagactcggagaggttgtgtgatgtgccccaggtcacagagctggctagaagcagggccagtggaggagccctgctctttgggggctgtgttcccaggctctcttctacactgagaatagaagcaccagagacagaggtggggaggggatggtgcggggcagaggggagggggaggctatgagaagcattccatcagatacaactttctcagacatttcaacggattcctcagtccctgtaggaccatattgtctctacggcaaatgatgacatgaaccgtccagttgctcccagcgacatcttacttctgctccttccgggcccctgcacaggcccctgtgcattcctggtgacgtcacccagctgtgctccctcatctcccgaaggaagctctgtcacagtcaggaagggggagggacgggcgggggtgcagagggatggcacggagacaggccgcctcttggcgcctgaaggaatgcgttctagcctggccgagtttggggagggtcctcaagcaggtcacttcccgatgatcagaaggtggacgctggggcctgaaatgcccaggctcgagatgaaaaataatccaactgaataaataaatcaccaaagagagcagcaaccactgtctgccaagaaatttaatcctgaatgtggagagagttgatgggggttgggggacagggagggctgaggttctgaaaagatttaattggtgatagggccctaagaatatgtaaatagtctcttggtttctgtcctaaaaggagaaacagatgccaaggactccaagctgagctttcttatgaaaatcactaagaccccagaatgccatttaaaatgtatataatttgattgttatctcctatggggaagggctccttgctcaaagtttccttttacatcagcccccgcccccccattgtaagactcaaggctccattttctgtccccctttcccccttcccctcctccaaagccctacaaccagctccagttggagaaggcaatggaatgttcagtgtgggggtgtgcacttttaagctctcaaaagcctgtggctaaacctttaactcaaagacaatagaaataaggttaacaatttccaagtccagcctctgctaagaaatgtccagtggcaaggaatcagttccctgtttctccctgggaagccagtcctattagtttggacattactgattcttagactgctcccccatatgttgaattaaatttgtctccttaaaacttttcacttttactccttggcatgacacaaacacaatggatcattctttcccatggcaagcccttctagaagtgctctggggggtcagatatatcggtgagcatggtgtgggaggctgaatatgccccccaaagcaatccacatcctaatacccagaacctgtggatctgttaccttacctagcaaaaggcaactttgtagatgtgattaacatttgtaatcagttatcttggactctccaggtgggcccaatataatcacaagggtcctgataaagagggaggtggaaggatcagtcagagaaggccacgtgatgctggaagcagaggtcggaggtcggagtatgcaggacatgagcctctagaagctggaaaggataaagggacagattttcccctagagccttcaaaaggaacacagccctgctaacttattttggacttctgacctccagaactgtaagagaataaatccgtgttgttcgaagccactaagttggtggcggtttgttacagcagacttaggatgttttaactctattacagcacatgggccaggtaaaagacacatgtatctgtatacagaacaacacatcaacccaatttgattccactcaaggtctttgcacacgctgttccctctgccaggaaagctcttcccctaaatcgtcacacagctccctcctttcacctctgtgatttctgctcaagcttcaggtcctcaaagacccttttctggatgctccatctaaaattgtgccatgcatgtcaccaccactccctagctgttccagtgtttttcaaactgcaggctgcaatccattcctagactgtacaacctatctaatgtggcccataaccagcatcttctacaataaaacagaagagaaaatatcagaacacatcatgtgtaataaaggtaagtagtgtttcttcacattttcatttttcttttttgtatgcttgtgtgtacattgggctgcagtgtaaaatcagtttcttactaggaatcaaaaattttgacctaatacattaccctgctgagttttcttcagagcagcggatgttatctgaaactctcttctgtatatatttattctccatctcctccaagcaaacgtaatctccctaagagacagactttgcctgttccttttttctttgctgcatccccagcacatagaacagtgcctgtaccccatagtcatacaatcaatatttgttgaacaaatggatgaatgaattagtgagcccatgatttcatgaatattattgtttaggacagaagcaacatttcttaaaagtgagtaaatttaaaggaacatattaagtaaatagtaatacaagaggtacccagtgaggcaaaaatcataaagatggggatattgaaatactaaacttggggacataaatattccctgctcttgtggaaccttcaagctagctggtgaaactagctgcagaagggctaaagaaaggacgaatcgtgtcccagaatgttggagatcacgtccgcctcctctcgtttcaccaataagaatgccgcagcccagagggcagaagtgacttctcccaggccacagagcggccagcagcagaagtcacagcagaaccccacgtcccgcctcctggggacaagctctctctcctttcagcccaaatgacagctttgggcacactgagtctcagtcagtttcctttcaacccaaatgcatttgggcccctaactccaaaaatccagggcaggaaagtccatcctaattctagcctcaccctccccaccccctgctctgtccgggaatttacaggcaatgccatgtagtagaaagatagccagctcaagaatcagacacaactggcttccaataggcctgtgtctattccttatgaaccaggaagcttaggcatgtctcttaatctctctgagcttcactttcctcacctgtaaaatggagcttataaataaaatagctctggccgggcacagtggctcatgcctgtaatcccagcactttgggaggccaaggtgggtggatcacgaggacaggagatgaagaccatcctggccaatatggtgaaaccctgtctttactaaaaatacaaaaattagctgggtgtggtggtgggtgcctgtagtcccaggtactcaggaggctgaggcaggagaaatgcttgaacccaggaggccgaggttgcagtgagcccagatcgcaccgctgcactccagcctgggtgacagagtgagactccttctcaaaaataaataaataaataaataaataaataaataaaatacctctgtaaagtgcccagaagaaagtaggttctcaggaaatgttgattctcttatgctttctgccaagagttttatgcattattattgtggtttcatctttaaccagtgcccacagaggatggacactgttcagatgtcttcactgacaagccagccaggaggcatcatcttccagtgtcagctccaggcactccggaacagctgtccctgcaaggggaactctgtcctctgaggtggagggcactcattccagcgcgatgagacactaaagcaaccatgcaggtgtcagaacgtgaatgagctgctcaggaatggtgacaggcccccttccagtgcggagggtctgatttccccctccctttcccactaaggtgcagtctagctggaaccacaggatgactcctgtgggctccttccttcatgaaactaacatgaacgcacgtattttacaactgccttggtatagagacaaaagtcaatatatcataaaacattttctttgacctaaaagttcattttttttctgattttaaaagaaattaaaatacattcatgggaccctaaaactattcttatatcctctgagcactgtgcctgtgtgtggtacccaagggataatttggccctgctccagcctccctttgctcacctcttccacagggcaggccagctctgtattgatcaactctgacttagaacataatttgtgtgttgtttttgtttgtttgtttacagacaggatcttgctctgttgcccatcctgtggcaccatcatggctcactgcagccttcaattcctgggcccaagcaatcctcccgcctcagcctccccagtagctgggactacaggtgtgcactaccatggttggctatttttttttttttcagagatggggtctttttatgttgcctaggctggtctcaaactcctgaccctgaacgatcctccttcctcagtcttccaaggtgctgggattataggtgcaagccaccgcactgggtctaccattctttacagtgagaaaaacgtgtgtcccttgagcttccactgtctttggccccaatcttaagtacagagaaaagaaagctcctgctgtcctgtaggaggtcagctgtctgtagtgggtggaatggtggcccccaaagatatgtccacgtcccagaacatctgaatgttgccatatttggaaaaagggtctccaaagatataattaagtatccccatgtgaaatcatcctgagattatccaggtaggccctaaatccaatgacaatacatgtataagaaacacacagagaaggcatgctgggagaagacaagacgctgtaaagatggaggcagagactggagtgatgcagcctcaagccaagcaaggcctgcagccaccagaggctggaagaagcaaggaaggatccctgccgagatggtttggatttgcgtccccacccaaatctcatgtcaaattggaggagtggccaggtgggaggtgactggatcacagatttcccccttgctgttctcatgatagcgagttctcacaacatcggatggtttaaaagtgtgtggcacttcccccttcactctctcctaccgccatgtgaagaaggtgctgggttcccttcaccttccgtcatgattgtaagtttcctgaggcctcccagtcatgcttcctgttaagccggtggaactgtgagtcaatgaaacctcatttcttcataaattacccagtttcaggtagttctttagagcagttagcagagactaacacatcctgctggagccattggagggagtctggccttgccgacaccttgatttcagacttctggcctcctgaactgtgagggaacaaatttctgttgtaagccactcgatctgcagttatttgtcacaacagccctaggaaacaaatatatcgtccattccacagtgctcctgccccaggctcctgccttgtggagctgtagaaagaacaagcgcttcaaagtaggctctgaatctgactctgccagtgagtatctgagtaaattgtcctacaagggataaaaaagtattgaattttttatttccatttatgtaattacaactgacaatctaggccaacatgtatctccttgaaaaagaaggaaaattaaaaggaaagatgacttataagtccagaaacaagaaaatgcaagtgatattttccagaagggtcacatgaattatcccgtaagtataaggtgaacatgttgtttgcaccaagagagtcgctgaggtgggaaaaggccaatgaataacatcatctctcaagaaaaaaaaatggtacagtgctctatagtggcatagagatgtccacataccccccacagaaaccctggcaaacccttgtgtgattcctagaaccatacttttctgtaccctattaactcatatgtaaaatggggacaactatctctaccttacagggttgtttagaggattagaaataataactagaaaatgcctagctcgggtttaacaacagagggaatcatcaagtcctgttgggctccaggaattgagccgaacacaggcctcttccttgctcagattcctgtgtagcctggtcctgacatttggggacaagatgggatgcctggagttttgaggagaggagccagctctaaagggagtgaatttgagaaagattcccaactaggaggcagtgttcatcttggccaaaaggcctggagcatccaggagtccccttggaaaaaacctggggtccactttcttccgaaaaatcaagcaaacatttgattcttttcagatattttctatttgattatttagacaaagagaatatggggagttgagggaagagaaggaagagcatcttcatgaagtcccagcagaagggtcagacccgcaaagaggccacaggatgggcaggacaacctcaagtgactcttttttccatttatggggggacaagctcttgctctgtcaccgaggctggagtgcaggggcacaattatagctcactgcagcctcaaactcctggaatcgagcgatcctcctgcctcagcctcccaagtagctgggaccacaagcatgcatcaccacaccaggttattgttttcatgtttcatacagatgacatcccaccatgttgcccaggttggtcttgaactcttggcctcaagtgatcctctcgcctcggcctcccaaagtgctaggattacaggcatgagctaccatacccagccccttttttgaggttgcagggaagagtataaagagcaagaagtcgtagggattccaggtagttgggaaaagaagatgggaattaccagtctgggcaaagagacataggaaggctaagaatccaggggccacaggaggtgggaaatgtgtaggatgcaaaacaggcagtcaaaagtcccagatcccaaaggccgccctgagggcacctgaaaacactcagctcaagtctgatcttcgccaggctgacccctctcttgcctggacctccccttctaagtaacccccttggggctcctgagggtccgaggctgatggctgcagaagtaggaggcaccttggagcacctacaagtacagagatgggccaggcagacctcagcctgtcaatcagtggaagaggtaggtttaaatctaggtacccaactccagatcccatactctgaacaaggatactgggtgttccctcctcatctataaaatgaggacaataacacctttctcacaggctgttttgggaattagaaacaacccactcaccttccctagcacatcctagaccatacaccaaagctttcatcatggccagtgggaccatgcctgggccacattcccatcagtttctgctataatttggatatttgtccccacccaaatatcatgttgaaatgtaatccccaatgttggaagtagagcctggtgggaggtgtttggatcatagcggtggatccctcatgcatggtttaggccatccctttggtgctaagtgtgctcctctccgagttcacaggagagtccagtcatttaaaagcgtgcgacacctccttccccgcactctcactctctggctcctgctttcaccatgtgaaatacctgctccctcttcgtcttccgccatgactgtaagcttcctaaggcattcccatgcctcctgtaaagcctgtggaactgggagccaattaaaactcttttcttcataaattacccagtcacagatacttctttatagcaacacaagaacagcctcatattgtctcccaggatgtcaatggctgggcactcactttgttaatgctgtgttatactctcattctactaaatggtaatgcctttcctatatctcccattgtcttacacagggccaaaaaatattgattttttaaatttccatttatgcaatgacaacagtcaatccaggccaaaacatgcttgaaaaatgaggaaaatgaaaagatgacttataagtccagaaacaagaagatgcaggtgatatttaccagaggggccacatgaattatcccataactataaggtgagcatactgtttccacctagagaatcgctgaggtgggtaaaggtcaatgcataatgtcatctctcaagaaaagaaatggtacagtgccctacggtagcatagaggggcccacatccctcacaggaccctggcaaacccgagttctttaaaacttggcccaggggcctgtcattgcacaggcattttccagacaatctatccccacccagtccaggtaaggtagaggctggaagggagctgtgcaactcacaggcgaggcctcacttcctttgaaccccaagaatctgaagatttggaatcaagcagacctggcttcaagtccctggctcttcaacctgtaactgagaacctagctccaattatttataataaattctctgagccctcagttgaatggagatgacaactttcttgggctgtttagagcccaaatgaggtgacttgtggaaacacagtttagacagatggcaggactcaaggactggtagctcttatttcaacagggcaagcttttttcctgatcaagtctagcgtttcccaggccgatgctgtaagactatacgttgggccaacagcaccacctggtggtcagtataagatctggcaaatctcgcccggggcttcagacctagtctggtcctagggaggctggcgtcacacacacaaaaaaagactgtcccataaagaggaacctggttgaaagaggccccacagtcaggaaggaagcataacctgacctattttcttccctaagagaagaaaacctggtagtgtccaagaaactgaacactgggttccatccaccttaggtaagacatttcacttctctgagcttccatttctttatttgtataatgaaaacaatgatactttatttgtaagtatcaaaaatgaaataaatctaggtctagtggcaggcatctagtgaacactcatggcaattttttatgtttaggaagcaactgcatgtgtctgatccctaaaagctttacctaatctttagacaacattatgtcttgtgtgtttggggcaagttttcaagaagaaacactcagtagcgagccctctcctgggcccagctccctacctctgaagccaccctctgcctctggggccactgcttcagggtcagacctgcttggggagcacctgtgagaagctagggttctcgggcactggcaaagaaggagatcacccattcattcattcatctaacaaaagcactgaacatttgagatacaaggatggttttgacatggctcctgtccccaaggagcttgcattctaaccgagacagcagaataataaagaaatacttaattgctgaccaggcgcagtggctcgcacctgtaattccagtactttgagaggccaaggtgggcggatcacctgaggttgggagttgagaccagcctgatcaccatggagaaaccccgtctccaataaaaatacaaaaaattagctgggcgtggtggcgcatgcctgtaatcccagctactcgggaggctgaggtaggagaatcgcttgaacccgggagaccgaggttgtggtgagcagagattgcgccattgcactccagcctgggcaacaagagtgaaactctgtctcaaaaaaaaaaaaaaaaaaagaaagaaagaaagagagagagagagagagaaagaaatattgaattgcgacaggccaggtactctgacagaaatgtgtactgtttagaaagatagcacagaggagaaagtagccaattcatcctgggggagtctgatggatcgaacatttcaacaaacacaggaaagaacctaccaagcgtggagcacaatgggaggacctggagattcaaggatgagtaaaacccaatcccttgcccaaagaggttgtggtcaacccgggtaagggaaagatgcagagagaacatgatgtgtggtctgggactgcaggggtgttggttaggggagcttgaggcaaagtgaacagcctgagcaaagaaagacttagagtagagacggagcagtgtccaccaagtgccttctccacactcatcctttgtgtcttctgaggtgcttcctctgctttgggattcaggaaatgcaatttttaaaattcaatgccattttttaagcctgcttatcctccactctggtcccttttccctggggttgcagatgtgcaaggcctgaatcacatcacccagaacatgcccaggcaagcccactccctacttatgttgccctggcacgggcgacacctccatccccaaccccctcggttgtgaatcctctctccaaggtgaacttctcaccaatggcctgggacagcttccccaagtgtctacaccactgtcctccctcaacccccaaactacctgaggctccagtgtccttctgccctaccagctggaggaggctgggatggagggccatgttataagggtgctatggtagaagaggggcccacaggttctaggtgcccttgctgatcagttccaagagaagtgagtggaaactaccacccaggcagcttcatttcctgagagcctactgtgttcattcactcttcagtggcagccgagcaaggcaattaagggcttagggcctggatttcacatccaagttgtatcacttcctggctgggtgggcttggataagtcacttcgactctcagtgcctccatttctttttctgtaaagtgtagactagggcttttgtgaagattaaataacataaagtacttagaaggctgcctggtacagagcaagagctcattaaccattagctattgtacaacaataattatttcttgagcatctaccatgagccaggactgaagctgcagctgtgaaccaaaaagacctggtcgagagacaagccatgaaagtaagacacaaatgttgctataatcaccactgtgatgggcgttatgaagaaaatgggtagtattaatggagaaaataaaaggaataaagagaggcaatggaattgttaatattttgggggtagtgaaatttaagctgagaccgaaaggatgtgtaggaatgaaatgaggagctgtaggaatggatgccaaggtcctgaggcagccaagaacactgagccatcaggaactggagggagagggccagtgtggctgccttgcagtgaacaagagagaaaggaccctccagctagggctggagaggcaggtagaagtcggctgcacctgggccctaaggctcgaggaaatgagcactttactctcagtcagtgggaaaccagtgacgtgtttcctgacaaggtatactttcacacgtgacttaatttacattttcagaagatcactctgctgattaccataagaatagaactgggggcatcagaagtgaagtgattataaatagggaggtggccagggctagtgcagggacactggagatacacctgcagatataatcaatgaatatggtgacagaacagataccagagataagggagagggaggatgaagatcacatttaacctggggagagactgaaggaggcacagatgtcaagcaagaccaagaatcaactttagagatgcaaatgtggaattccaaagaaatgtacatttaggagcaatacgtctaagagtgagagcacatagatttcatgtcaagtcatgggaatgaacaaaattacttggggagaaattatagagagagaatagaagtgggatcaggattaaagacttcaacatttagaaagcaagtagagaaacaagaactggcaaaagagatcgaggagaagccaaagagataaggaaaaccaggagaaactcatgtttcaaaaaggaggcaatgggccacagggtctatagctacttccacgttaagtaagatgaagacaaataagaagctattggatgggtatgttggctgacgcctgtaatcccagcactttaggaggcttcagcccaggcgtttgagagccagcctggacaacatagcaagaccactttctctacttttaaaaagacagagagagaaggagccactgtatttggcatcacggcagttgttgatgacctcggaaagagcagcctcatggagtggcagagtggatgctagattagactgggtgggtacaggggcagatgtgtgggcagttctgtgtagcagcttgagtctggcatgggtagggagtaaaagaagggtagtagctagatagggatggaaggggtcaaaagctgtttttcacccctttaaaaagttcaaaaaattcagcagttgttagagcactggctgggatgatctattagagaaagcaaaagaacaacacagcaaaagaggagataatagtagagagagggcctgagaggtcatatggggctgggtccagagcacgtgtgggcggatgggcctataaggagatagaggagaagctggtggccgatggagataggtctgtcaaattgaactgtagagaagtgagaccccagctctgtgcaaggcccttctacattttttttttttttgagacggagtctcgctctgtcgcctaggctagagtgcagtggcgcgatcttggctgcaagctccgcctcccgggttcaccccgttctcctgccttagcctcccaggtagctgggactacaagatcccgccaccatgcctggctaactttttgtatttttcagtaaagacggggtttcaacgtgttagccaggatggtctcggtctcctgacctcgtgatccgcctgcctcggcctgccaaagtgctgggattacaggcatgatccaccgggccaggccggtcctttcacatttaatcctcaacatatatcctaggaaattggctttatttccccaacttgagaaatgagggggacgcagcccaggaatgttaagttgcttggcccattgtcctgttgttgagtagccgaaccagaattcaaactggactttgtccaacttaaaagactctgccttcttcagcatgttaccctgaaaagctcacaaaaaagtactcattacagagggggagctcactaagtgttcgttggatgaagtcttagttataagcacaaactgaccccaaactgttttgatgttgatctggatcttggcagcagcagagcatggaatccccagggaataagaggggctggtagagaggggttgcttagaaaggagtagggagagctaagatgagaccagggtggaaaggtgggtaaaagaggaaccgaccagcataaatccactgggatgcagatctccactaaggcctctggaaattctccggtctctgagctcacctctttcatcccactacactaaaaagtaacagtggggcagagacaggctagctgtttgccaagcccattttcccttggtcctgggcatgcaggtagactacacttcctagacatccttgatccagacaccacacaccagaatacagatgacctggggttccgctggattcctagcttgccagatgtcacggattgggaattcccagcagaggtagaggccccccggtattatgcagccctggattctggatcaagctccagctctatcactcgctagctctgtagttgtcaccagctcactttatctctaagattatgaaacactcattgacgggttttcctctagtatttcctgtctgtcaggtccattatcccattagacacaggattttgcagcatctatttcttcagagaaagaaagctacatcagaagcaaagcaaacatttttgattttcaaaaatagatagaccctggaatctcaggacatagcaattacatgatacatcagaattaggttattgagccaagattgattaaagaatccctccatatgaagaagaaatggtggagccagccatggtggctcacgcactttgggaggtggaggcaagaggatcacttgaagccaggagttggagaccagcctgggtaacatagcaagacctcatctgtgcaaaaaagaaaaaaattggccatgcacctgtagttgcaaccattatttcacattcagaataacagctactctagagtctgaggctggaggattgcttgagcccaagaattcggaggctgtagtgaactatgatcatgccactgcactctttcctgggcaacaaagtgagaccctatctcaatcaatcaatcaatcaatcaatgccaggcaaagacagaccagctgtttaccaagttcattttctccatggtcctgggcgtgcaggtagactacacttcccagatacctttgcaggtagacatagccatgggactgagttccagccaacagaacgtgattggcaccgatgtgtgcacttctttcaggcttggacctggaaagtgttccaagttcgattcttccacactcttgcttaattcaggacctgatgccgttatacccagcaactttgaaagccacgtgttgaggatgagggagctacagatggaaggtatctagagagccacctgccaattaggaacacccattttggctttcatatgactgatgaagaagcttctacagtgtttaaactatcatatgttcttggcgttcgcatctaatactgccttcaataatacaatttgagacgaaaccccaagggaaacactgcaaggcagtgcaggcggccacagggaaatagaactggccaacattccagttttatccccacaaaacgatgggagctcaaaatagaaattgaagttgactatttgcacattggagtctgtggactaagatttttttcttgctgcttctccaataatggagctaaaaatgtggtccttccttcctcagagagttgtaagaatcaaaaccaaataatgtacttcatagtaaactgtaaattattctgaaatataatatatcattactgtcatcatcattattaactttggccaaagttgatggggaaggaatctcaagggtccagatcaggggacatttatagcaggaaggccagacccttctgccagcccaaggaaaagggggaatgtccactccttggataaaggcctataatcccaattcacaaatcctgaagaaatggctccttctctattcctcaacccctatgcccttcctcaagcaaaagcagccttgtttcctagagatctgtcagatgctcctgatgacaaaagagaaagaggacttctgatggagaacagaacccgagaacgtgaagggtgttaccacctcacccaggaggcagggctgagtccacttcactcagtccaggctgcctggagcccacgccccacgtaggaacaagctgatctccccctccaaaggaggctctcagcaaatgggacctacatccccccatggcaacttaccttcttcactatatttggtccttaatggagacattgctttatggaaataaacaataattatttcacatccataatcatagcttaaaataattagtacatttattaagcactcactgggtggcagggactttattaaaaatgttaataccatgtgtcctcacaaaaattatcattatcctcatttcttttttttttttcttttgagacagtctcactcagtcacccaggttggagtgcagtagcatgatctcggctcactgcaacctccacctccgaggttcaagcgactcttctgtctcagcctcctgagtagctgggattacaggcactcaccacaatggccaggcaaatttttgtatttttagtagagaaggggtttcaccatgttggccaggctggtctcgaactcctgacctcaagtgatccgcccgccttggcctcccaaagtgctgggattataggcgtgaggcactgcgcttgcccttattatcctcatttcaaagatgaagcacctaagactcagagaggccaggtgatttgtcctaaatcacaaagcttgattgtggcaaagtcagaattcaaatctatgactgcttgacttcagaggccaagctcttttactcagtaagctatatggcatcttattttctgtttatgttgttacaggcatcggccatctgttctacacatgtagggcatctgatgctttttaaaagagaaacattattatcaagtctcatcggcctccttgttttgcatggtaccatgttaactgaaactcacggatatcatcaccatgctctcactttacaattttcagttgccatggagctgtgcaaagtgagaacagcctgtgttatcctcgttgccattatcagagtatcagactgcaatcatgctgcataacaggcctttccaaaactcagtgacctaccaccgaaagcatttgatctgtgtcactcttgggtgtctgaggtggctggggcagctctgtgtcaggctgcagggcagctgtgcttggctccaaactctgggttgggttcatacctatgcgtgtgtctgcaccttcttcttggaccagcaggtagcagggcgtattcttctcgtggaagatcctaggagttctgtacaagaggccaagttgttctagaacatttaaggcctccgaacactcttagcatcccattgggcaaaacaagtcagctagccaagctgacatcaatgaggtgggaacgtgtactccactcacagttggggggcactgtaaagtcacatggaaaaaggtagagatatacaatcctattgcagggggtaaaaaaataagacccagagccagtcagccacagtcagtgtcttcaccatcattaccagcaggcttctagcttggttaataggttggcagagagcagtcctgatatccttctgagggctgcaggggatacatcagcctaagagattacagatggcctcctcccttccacctcctcctccttcccagtgatatcttggcttctccctctgcctccaggcaccctcctctcaactccttccctttccttggctctggctattgcagagacaggttctcatcaaaacccagttgacccaaaacaggactgcagcaaaattcaaaagccaattcacaaagtaaatagagtccctcagctgtgcagctatttcctgacttaaacttcataactgtatgaagtacgcagggctggacttgttttccaggttcccactgtatgggtgggaatattgaagctcagagaagatacgatttgctaaaagtctcatgggagcgtcaaagtgcccagcccaaacttgaatacagttcttctctctccaggccctggtaatgggaggaaggaaaaatcatcaaacccagatcctgaaaacagctagggtttggacaagtcagactcggttgggagaaacgtctgggaaaaggtgtgtcccacgaagattccctgcacacacttccctccggaagtttggtcggcacagctgaacatagtccagctctcaaagtcctccactgggacgtggccagaagcatctgggctacaagaattcagtgtccttctgagtgtcttaagaagagccgatttgcatctgaattctaggaactgtatgagtttattcacgtccatcactaggcccaaagcggcgttgttttccatttctccagggccttttctccagccgcccttgctctccacccaccccattcctgccccctcccactttctctagacatgaagatggtctcctgcctgattgggtttgaagtggaataaaaattttaaacagactccatcctgcagacattttagctacaaagtggtattgctatgttttggagatgatagtaaaataaggacttttttttttaaagttaatgaattggctgacattatgatgtcagaaggactggagccaaaggtgttttgctaaagggagtctccccacagcccccactccagacgacacagcacccctggagcccatagtacttgtgactgttcacgctgtttacacacccagctccgctgactgcctctttgtgggaagttgtttacatgaatttattttgggaaaattccattagacagcactgggatttcttcacaaatcattgcctctcacttgtgtcttgatcaaatctgggcaggcgactttttcttcagagccctgtctccctgtgtttctattagggattgagggggtactcagggagaggggacagaaaggataatgaagtagccagggatggcttggaaagaagaggcctgtctggttggattagaaacaacacttgagggacaacagaggggtctctactggcttgggggctgcagactcacatgcggttttccaggccacagccattcatggacttgcccatcctgtgcctggccctgtgttaaggtgctgggacacagagacacattgccaatgctccatgattccaagaaccctggaattcaatgaaagagcaacagaaacaagcaattccaatcaaattgtcttaaggtccttcttgccccacctgacccttggttaggcgtctggatcctgtctatcaactcacttttgtcattctctctgttgaaggagaatcccaaatattggatgcaccccaattagctaccattggtttaacctcaaattgacatcacatgtaaacatgccacccagtcacttctttagtgctggagaaattccctcttgtccccaaagacagatttaccggatacctacttggtgccaatgcctgtggattggagatcctgagacattgcccttgctctgcaagaactcagcctggacccagcagaggaggaagaggaacgggactgcagataaaccacaaaggagacacttgctcccaggtgagggaagctggctgtggttccaggtgccctccaaggagagctagaaggaaggggacagctcctggaagtaacccagctccactcatgggtccagccactctgtgccttcatctatccagcaggtctggctcccctgtcccaaaacacttctcccaacacacagactgcaaaggtatatggtcacagggttcactgaacacccctgggagggatctgcttctctgggtttcctcatttctaatcagaaggggctgccccaccaggtctgcacatgtgttagccataagaacctctgtggaagcatcttgggcggtgttagtggcccacatttactgagcacttactacacattaggcacaggtctacgtgtttcacatgtgttaattcacttaatcctcacagcaaccccataacaggtacttatagccatccacgggggacacgttgcaagaccccagtggatacctgaaaccttggatagtaccgaactctgtatacaatgttttttcctatacatacataactatgacaaagtttaatttataaattggcacagtaagagattaacaacaataattaataggagaattatatcaatatactgtaataaaaattacatgaatgtggtctctctctctttgtatctatctctttctgtctctctctctctctttctctctctcaaaatatcttattgtactggactcacccttcttcttgtgacctgtcaatctgataaccaagacagcttctaaatgaataacgggcagggagtgtctacagcacaaataagctggacgaggggatgattcagggtgaactgagcgggagagtgcgagatttcatcacactactcagaatggcacacaatttaaaacttacaaactgtttatttctggaattttccatttaatatttttggatcacagttgatcaaggataactgaaaccgtggaaagcaaacccatgaataagggaagactactgtactacagataagcaaacgttaaataataagtcacatacccaaaaagccagttaaggaaccagataatagcacagctccttttgtggatgaaagggtgggtctgctccacctcacagctctcactctaggatctcagtgttggaaataaaaggacttgctttgtggacaccactccatgcccctaggaggctccactgccaggggcctgctagtagggaggcagtgggacagggtagattgagcattcacttcagagtcagatctcactcatattccaactccatccctcaacaataggggaagttacttcagcaaacttcttaaactttccagatcttgtttccttcatagggcttctgtgaatgttaaatgagataatgtatgcacaacacctagtgcagcattacagtaggtattcaaaaatacagcaattgttattaagatgcgtacaagaggcagcatgttgtaagatgttcaagcaagatgtggtgccattatgggctattccttgagcctcagagtggctctatttgggagatggagaccatcagagcaactggccttactttgtttcatatccctcactgctctcaacacatttccatgcacatagcaagtgctgttgaatgaatgattcgtggatggctcaattggtgggaagatggatggatggatggatggatggatggatggatggatggatggatggatagatgaatggacaaatggacagatggacagatagatggatggtctaaatttgtcaactccttataaaatattccatcatacacctctacatgtctcatttcaacacctcaaggaacactccagtctttgactcctcctcattctttcaaacccgtgactcatcctgccagataacctcgttgttgtctgtctcctcagcccctttgcaatgatgcattgttccactatctggtagttcttgactcttgctcttcctctgaacagttttagagccacactctacatccatgggccagttccatcccagttcccagtactatcctccaaaaccccagcctgtgcacagtgtggtacggctgttgggaaggaggtaatgtccaggtatgcattccctgaagccctggtccctggagacctgggctggaacagtggttcctgtgtgtcttggcattccatggccagactccagccacgcactgaggttgtttcatgcacagtcctaagtgctctgtgttctgcctacacaggagccaggagcaaacccagcctgaggctctgtcgccctccattggcagtggctccagcagagcatggagccatggcatgcgatggcttcctagaagccaatgcagtcctccagctgcaacaggtatagctggattcccaaggtcagggctgccagtctggcacagtcatgcacccaccaatataccatcatagactgctctcaccatgaccagtcgcagaaaatctacctgataccttagagagtctgcccccttcctcttacagatgcagcaataccaagaaaacctcaggtccaagttctcaggggatcgtgcatgtcaccctcccagttttatacctggtggggaagatagaaacgtggacttggctttttttcccacaactggggataatactgaggccaggtttagactgtggtggcattaatgggtctttgtctcttttaacatcccagcctcagtttctggaaagaacagcctatgtttcataagagttctgggtagtaggatgctaattagcaattatagatttaatgggagggcatcagctctcacctggctgaaggtcaggtctgtgcagacagacactgatgacaagcagccctggcttagggaaaaggcagcttgtcagtcatgagttatcccctataccatgcatttgaagcatatccagaggctgatgtcatgtcacttgctactcactttacctttgtcactggcttctctttcccagaggccctgatccaaccttctcccaggaattccattacctctgcttcagtgctgccttctcctggatgccacctctgtgctgtcggttccagaaaaacatgcattttataaggacatgaaggtaggtgcactgctctggaatcacttccatccagtttaacctggagcccatctctgtgataagcacacccactccccttgcaaacacatcaccgccaagtgatcctgtggtttgccaggccctccaccttccctgcaggctcttcacccagggacatgttagaaaggaacaaggaggtgggggtggggggtcaccctaacggatagagtaggtgcctaaatcatccaggcagaaggttagttcccaaagagactgttagttgctggcttgggctaaggttacctgattgaactaaaatgtatggtttctgtccaaccccaccttccaggaataaaagggcctcatgaggaagagaaaatctattatacagaattgtccttgaactataatttcactgcatatataattttagtacaagaaaatgtatgcccccactgaaaacacacaagcagcaacctcagagagggatgagagggttaaaggagacaggtgcccaaggctcctggctttgagtgaatgctcaaaaagtagctgcaattattatttttatcaaaatgaagtttataatgactctgctttaaacatcatagaagttaaaagggactttcccagggctgtgtcttaccccactcacatcagcgtccagggatgcagagaaacggcctgacattcacagcttgtcactcaattccatggctggggccagaatccccagtcactagcagtctcattggtggactgcagtcccaggtgttgtggaagagggcaggggatagaggagggcaggcacagttcagaagagagctgcctactcttatttatgactttgaccctccccagatcccagggacagaagtttagactttccccagtccaggctggctaagggcaagatgaatagcagagcacctgggctatgcagaggaagccaccaggtatattaaagagctgggttccagggagctagtaatgttctgttctcaatctgggtgctggttacaaaggtgtgataactttctaaaaaatcctcaggttgtatatttaggatttgtgcagttttctgcacttacactttgattaaagatttctttttaaaaatcaccaaaaaccaaataccctcccacacaacctctggattcttccctgcacccaacctctggattcttccctgcacccaacctgctaggcagagatgagcatccttgcagctgttgctgtaaattgtccagtttgtttattgatctacttaagaaacagaatcccattctgttgcctaggctggagtgcatagctcactgcagcctcaaactcctgggctcaagcgatcctcccatctcagcctccaaagtggctgggactacaggtgcatgccagcatgcctggctataaattgtccagtttaatccaagttatcgagagattgggtcaggccagtcaggactcccatgggatatcttactctttcactacaaaactcagagtctgaccttgattcattctttcattcatttcacatgtttatatgcaccacatgtttatactcatcagatgctaaactggactccccatcccttaccctgaaacctgcctgacctccatgagccaatacatcaccatctacccagacacagagtccaggagttgtgattccacctctagtctaccccaccttcctggtttacaagaaccaatcagttatgctccaaattctgctttggaaaattcatcagactccatctcttcctctccaaccgcagggcgtgtccctcatactctcacacatgggtcattacagtggcctcctaccttgtatctctgtctgcagccttcatggccttgaagatgacctctgatatggtttggctgtgtccccacccaaatctcatcttgagttatagctcccataatttccacatgttgtgggagggactcagtgggaggtaattgtgtcatgggggcaggtctttcccgtgctgttctcgtgatggtgaataagtctcacaagatctgacggttttataaaggggagttcccctgcacatattctctttgcctgctgccacgtaagacataactttactcttccttcgccttccaccatggttgtgaggcctccccagccatgtggatctgtgagtcatttaaacctctttcctttataaattacccagtctcaggtatatctttattagcagcatgagaatggactaatacaacttcctatgccatcatcagagatagggtcattcatcatccaagaccatcaatgcctcctgactgcccatggggagagggtctacatccctttacttgccaacaaggcccttcgtgatccaagtgcacctcccactgcattcctccattcacctaccactgactattatgggccactctccactcccccatggacatgtaatacatttttatttccatgacttggctcacactattcttccaataccagatactctccccacttccccatcttttgacacttccctcagcctccagtgctctgctcagaagtgacctcctttgagaagccttccctaatcccttggtcagccttaattgcctcttcactcagcatctaccacatgctggtagtcctttaataccattttgccttgtcttgccatgattgttacacaatcagaaacaccagctgggtctccctacaagatagttccagaagctggacctttccagccacttccaagactgctggacactctgtccaagccatcacatctcttgctgggattttcacaattgtcccctaattgttctccttttattctggcctcctcttccacaagatctcttctttaaagactggtgctgctaaagatctcagggcatattaatcttcagtgcaaagtctctctcagaataaaatcccaagtcctcaccatgggatgcaaggttcctggatccataaaccaaaaccaaggcaactctctccaaggtcctacaggatgggtcccagtcacctctctccaaggtcctataggatgggtcccagttacctttccacaaggtcctataggatggtcacctgtctccaaggtcctatgggacagggccctgtcacctctctacaaggtcctatgggatgggccctgtcgcttgtctacaaggtcctatgggatgggccctgtcacctgtctacagggtcctataggacagggtcctgtcacctctctacaaggtcctatgggacagggccctgtcacctctctacaggcttctcctcagcaagggccagccatctctctgacctcagctcctgcctccacccagccccatttcatcctataggatgggtccagtcacttctctccaaggatgggtgccactcacctctctacaagatcctataggatgggcccagttacctttccacaaggtcctataggatgggtccagtcacttctctccaaggatgggtcccactcacctctctacaagatcctgtaggatgggcccagttacctttccacaaggtcctataggatgggtccagtcacttctctacaaggtcctatgagacagagcccagtcacctctctacaaggtcccatgggatgggcccagtcacctctctacaaggtcctatagaacaggacccagtcacatctctatgaggtcctatgggacaggtccctatcacctctctacaaggtcctataggacaggtccttgttacctgtctccaaggtcctatgggatgggttcctatcacctctctataaggtcctaaaggaaggggcccagtcacctctctacaaggtcctgtgagacagggcccagtcatctctctgcaaggtcctacaggaaggggccctgtggcctgtctccaaggtcccatgggatgggttcctatcacctcactacaaggtcttatgggatgggcctagtcacctctctacaaagtcctatgggataagccctgtcacctgtttacaaggtcctatgggatagggctctgtcacctctctacaaggtcttatgggatgggccctgtcacctgtctacaaggtcctatgagacagggccctgtcacctctctgcaaagtcctatgggatgggccctgtcacctgtctacaacgtcctatgggacagcgccctgtcacttgtctacaaagtcctatgggacagggccctgtcacctctctacaaagtcctatgggacagggctctgtcacctctctacaaggtcctatgggacagagccctatcacctgtctacagggtcctatgggacagggccctgtcacttgtctacaaagtcctatgggacagggccctgtcacctctctacaaagtcctatgggacagggccctgtcacctctctacaaggtcctatgggacagggccctgtcacctgtctacaaggtcctatgggacagggccctgtcacctctctacaaggtcctatgggatgggccctgtcacttgtctacaaggtcctatgggatgggccctgtcacctgtctacagggtcctataggacagggccctgtcacctctctacaaggtcctacgggacagggccctgtcacctctctacaggcttctcctcagcaagggccagccatctctctgacctcagctcctgcctccatccagccccaactcattcatgtggacccttagcccctgggtgagtcctcaaccacaccaacatgatcacgctaccacttcagagccttgatgtttgctgttccctccacctggcaagtcctgactcctcttcttgctgctcctctgagtcattcattctcatgcatcgtaagagaggctttaccgcatttctcctcaaccctcccctcatactccactttcctgcttagttctccacagcgcctacagcccctaatatgctatgtgtttctctcttagtgtttgttgacggggatcagagtttcagctccctgagagcagagacctcattttattagctgttttttccagggccaaaaacagcacttggctcataggagatgcccagttattattgtggagtgaatgaatgaatgatgcacacatctgtttcccctcactatatgatgttagtaagaaatattttggcttgccaggacagaaagccaatttaaactagcccaaacaagaagggacatggattggctcaaggaatccatagacagagtccacatggcaggagatacagaaggtggcaattctcaaggtttatatctaatagcttgagctgccagagaataagtcactcagtttcatttccaaaaatcccaaggaagaaaactgatgcatgctgctcaggtcaggcatccatccctggaccaatcaactgtgggccggggcagtgccacagccttcatgtgaataagggagggagggaaggatagtgcccaaaagatgagggcatggggggaggggaagctgggcagacaagcccagagatgcccatgataaaccagtgaccttaagtcttagcaacccttgcataccccagaaaagtctagcaccgtgcttgcctttcagtaggacactttagtaagtgtctgctgttgttgaatcaccagtgctgctattgtatctattactctttgagaagcaggatggaggaagtcaattatataggaggcctgatgcttgccctcagagagcttacaaccaactatattatttccaagtttgttctagtggcagaagcctttctgctgaggcctaagtgtaaaacagctcatgatggtgatcaggggatggttgaagcaagagatggaggtgggggggtcctctgttcatctgtttatccttccaggccttgccatcccccacccccaggagaatcaggctctgcacagaaaccataggaccccatagatccccgtttgaaacccaccatctcggaccatgagtgccctatgggcaagtttatgtctttttcatctttctgtccccagcccccagctcaatacagaatatatgtatgtattggttgattctttcagtgaaagattgaaagatttcaatctcttgtgaaatacctgaagaatcatcatcacaaagcacatgagcaaacgcatagtttttagttttatatctcttttaagtttcatagatatttggcccaaagaaagccctcaaagttgggtagagaaaagccatgagggcttcctggaagaaaaggcttttgagctagattctgaaggaagcatagtaaaacagagaaaaagcagggagaaaattcaatgaggagagcccacaggaacaaagacatggaatcaggatggagcttcacccatgtggggcaaaccctgggctcaaatagggggttaataacaagtgaagttggtaccacacatttattcttttttttcttttacacttcccagagcttcagtggaggcagatgggggtccagcaagaatgccaaagcagccatctcatgatgtttgacaacattcatctgagctgtttcatgtttaacatgtcttccaactctgtaaaattacagaatggaatatgaaagatggcattttattctatggctggtgaaaaggatgaaaaaagacaccacttgttttttttcattcatgcagctgatattggttgagcacctattatgttcttaagcacgatgctagacgcaagcgatatcaagttggctaagactctccaacaaccatgctttgggctgatagatgtgtgaacaaataactactggtggtgatcgctgtaatggaagaaggtgacacaggtgcagaggaggaaatggctaactgccagagaagccagataagacctcaaggtagaagcaacctctgaactgaatcttgggtttttttctgtaaaggaccatacagtaaatatctgaagctttgcaggccgtacagtctctgctgcaactactcaactctgccactgtaacacgaggtcagccatagacaatagataaatgaatgggtgcaactgtgcaccaaaatgacattatttatggacacagaaatttaaattctctataactttcatgagtcatgaaacgtcatttttcttctggtattttttcggccattaaaaaatacatttttcaccaacctgatgcttaaaaatgaaaatacaaaaactttcttggctcttgggccacaggaaaccaggtagagggacagatgtgatccacgggctgtgatttgcagacccctgtcttaaaggctgaattggcatacccctggtgaagatggaggtatgagttagtaacgagagtaaaggggggtctctgcagtgtaaggtccttagcaaagtctcagaaacacataaagattgagtctatttgggaaattgaggtcgttgtgagagtgaggcctggggtccggatcgaaactggaaaagtcaatagtcaacagtttttatatgcccactgttgaacacatcattattttaaaatattactacataaaattacaattaaataaattacatttaaaagaaaactggccgggttcagtggctcacgccataatcccaacactttgagaggccaagataggcagattgcttgagcccaagaccagcctgggcaacatagcaaaacctcgtctttactaaaattacaaaaattatccaggagtgttggtgtgcctgtagtccaagctacttgggaggctgagctgggaggatggcttaagcccaggagatgaaggttgcggtgagctgtgatcacgccactgcactctagcctggatgacagagaagaacctgtctcaaaacaagaaaacacacacacaaaacaaaggtaataaatactcaaaaactcatcacttcctcattatttctgatattttactattatctttgcctttgagattatttacctcgagtgcgtccacataatggagatgccatgacatgctactgtgtttctcttcccaactctgtattctgctacttcacatgggtagcttgacattggccatgatggggatatttacactgcaggaattgacaaacgctacaatgtagggcttctttttagtcccccagagaatcagtggttaagcctttaccactgactgcaagcaaaagaaaattaagtccaggacttaagtaatgatggcaaaagtggagagaagggggataactgggatagaattagactcaaccgggtagctttggaggaatgaggaagaagcggaagagaaggatacctccaagcccgagaaagctatttataaagaagcactttgagaactagacttggctcggcacttcctccacacgccttctcattggacaaccccagaagtaagtgtgagagctccgagccccaggcccctggcagctggcgcagcagcaggaggcacagaacccttgtctaagatcacccgaggaggtgctgctatggccaagcccccagccttccaatccccctgcaccacaggcccttgtctgtgtatgtttacatctcatatatagccccgtgcagagctgtgtgggcacccgcagtgctccacgagcggtctgtgtgtatttataaccacacagccatgtgtggacagccccacatatagatctcacctccatcacttcacacatccccgaggtgcctggggcctgcttcctgacctcacatcgggggctgtgggcctgctaattgactctgatgggaactgtgccctgccagccaaaggcatgcagcccacctcccacagccagcgcctgctacctcccacggcccttgggggccggaccttcctggtaaagctgtgtgagaggcagccataaacatgccgcaggctgacctgcatatggaaatgaggctcgcggtttgcctggcgcccagccacaggcctgtggccttgctactgccaagtatctttagcatgaacttcgttcactttgcccccctccactccttttcagtccctctcatctcctgccttgtcttactctcagtttggggtgcctctttccaggctggggtcttatcctcaagactgcatggagggcttggcctcatcacaccccatctgatgataagaacaacaacaacataatcatagcttgcaatttctgtgctaggcatttcatgtccattatctcgctgaatacacatggaggccccgttttacaaacaaggaacctaagactgtaagagggtcatttggtggggagattaggactgaagaggtcaaggttggcagattggttggggctccctgagctgcacatgccatgctggaagggcctctgggtgcaggagaaagacatggaggccatcactaggccagcaatggccaaatagagagaaggggatgattggcatagactcaacatcaaccaggtagcttggcaggatgagggagaaggaagaggaaaagaaggatgcctccaagccagagaaagagctatttatagaggacagtcagtctttttccaattaagagtggggcaaaggccattcaggaggctgtaatgagaggaagatgccaccctgggggcacaggctgctcctggttgggcaaggtgcttactcttagacagtgccagtctcagcttcctaagggatctgatctggaagctcacattgaagacatggcccaaacagctgccctggacgtgcttcaggaatgtcagtccatcatttcctcaccatttcacagaattccctgaggtaggatccaaccaccttggggagaggagatgggagaggtagccataagacttctcttgttgtcaatgaacagcggcctagggaggctttcctgagctttgttctctcaatgccccgacataggctgaagttaaccgaggctggagttgtggtcatctcctactttcatttggcatgtcattgtcctttgcaggcctacccttgcccataagtatgtatgtcagcccctccctccctccttccttacctttttctttcctccctctcttcttcctattccttgtttctacaatttaacagaatattcttttttgagttgaagcactatcaatgtccttatgacctccattgatttgctcctatgtctgccctctggggccctagctaccctatggaataggttcttttgctatccccattttagatatggagaatcggaggctcaggaggattaagtaacttgccccatgtttcacagtcaacaggtagcagagctaggaattggacccaggtagcctgatgcaaaagccagttctcttaaccaccaggatgcactggtttttctctgtcttccattggcaaatcttcaaataccttctcaaaggtcatcccatccagccccctgcttttaagcaggaatgccttaaccatgaatgtccactttatgtctttcagaggccttagagattcaaccacaaaagagagatagtgaaataaactatgctgagcatcaccaggaaccatgtgcaccatctagttacattacttgcagtcacccatttggggatcttccctaaatcagcctcccatccctcctagtgctcctgcagcatgtctcccctaattctgtgctggtaggtccccactgcagaccctccatcccccactcccaagcgttgggccataataaacccagctgaaatgcaagcccaagccctgcccattgtcatcacagtaaacagcctggacccgaaggctgcctccctcactccccagaagattaataaatcagattcagacgcctattgttctggacacagtcagaatcaattgcaggattttaaatctctcagcacagagcagctggctggcaacaagaggccccgctatgtctctgggaaagctggccagggatggaaataagaaagagtaaaagggaagaccaaataatcaatagttaccatgcgctcttggctatcacacggtattgctcaggaggctggtccctaactttattgtgagtcacacatagtaaaaggacgaggaggaggcagaaagtccagctgggaagagaggacgccagaaagagccaggtctggtggacccagggttagccctcagatgggtaggactgctccacacccacctcctaacctcaccgatggctaatttcatctgcaaatgtttgaatctctcaaaagtgagcactcactgcccaaagccgcacagtgaattctagcttaggatcccagaattcccaagaagaattcatagaaatccttgtatcttagactcattcccactcccttgccacccgcaactcctagactttggttttgttgtcttgttgttgttgttgttgttttataatcccttactcccatgggagatatagtgtgcccgccactgccgcctgagtggctgctagcattttccctagctgtttatgtggaaaatcataaaaatatttggtggccaaaaaaagagaggagaaatgctttggtggtctgatgcaacagaattcctttggtgggggaaggaagctggatgttttattctaatccaaaagcatgcataaatgctgtattgattgaagagtaccaggtagaatgcacgttcttctcagagaccttccccccacccaaccctctccaagaagacaaaagcactgttggcagctggcagaatgtaagtcacttataacccagtcacaaggtttgggaagagctgaaagcagaaattcttgcaggctgcgctctgccctgagtgtggtattatgctcctgccctggtggcctaattcgctcggctgcaagaggaggcaaggatgctgatgttaatgatggtgatggttgtggtggtgatccagatattgctgttgttactgcagctgatgctgatttttttttatgcgctgcatgttatgttttagttatgaagcctctctgtatacattctctccttcgatgctcatagtgactctccatgggaggcagatcaggtatcatatcacatcacacccatttcacagaggaaaatgaagcccacagagacaaagtgtcttgcccaagagaacacaacttgccaatgccaaaccctgcaaatcagctttacaccatgttgacttgaactctgaacagcacggtccaagagagtggtaatgcaatctacatatggcatttaatattttccagcagccacatttttaaggttataagaaagcaagtatatataatataacccaatatatccaaaatattatcatttcaacatgtaatcaatgcagttgtcattaatgtgatgttttacattctttgttttcatactagatatttgaaatctgatgggtatttttcactttgagcacacctcattttagactagccacatgtggctgatggctatgttactggccagcccaaatctacaaggacttgacagtgtctttgatgccaagtgtattttttgagaaaaacctcaaagagaggaaagcaggatcattgcttgattcaactttattcattaagaggaaaaactttcatctcaacttcacctctttctagacattcagacaaggtacaaaaattatttcagttgacaaactgtatttttcctcttctttccatcctcttttccttcttctcttctttaatcatcatctgctaaaacatctaatccagatattagcactgagtgattagcagttatctacaagcagcaacttggtctactttttgaactgcaccctaattatacatagtgctacatgaggcacagggcagaaataatgatccctccaagaacaccgggcactagaaaaggaggaggagggagagaggtcactagaaaaggaggaggcagggaaggaaggagggagggagggagggagggaaaggaggaaggaaaaaaaacataccaggttcaatagtgccccaccccacaaaacttatgttcacccagagcctcagaatgtgaacttatttaaaactagagtttttgcacatgtaattagttaagataaggacattgtcgtgggccctaaaccaatgactgatgtccttaaaagaaagatatgtggacacacacagaagacacaagtaagaacaccgtattagtccattctcacactgctaataaagacataccagagcctgggtaatttataaaggaaagaagtttaatggattcacagttccacatggctggggaggtctcacaatcatggctgaggatgaaggaagagcaaagagatgtcctacatcggggtgggcaaaaaagagcatgtgcagtggaactcccctttataaaaccatcagatctcatgagacttattcactatcacaagaacagtatggggaatgtgcccccatgattcaattatctccacctggccccatccttgacatgtggggattattacaattcaaaatgagatttgggtggggacacagccaaaccatatcaaacactatgtaaagatggaagtagggattgagcaatgtgtctacaagctgcctttgatcacaagaagctaggagagaggcatggaacagatgctccttcagagcctccagatgaatcaaccccaccagcctcttgatttcggactccaggtctccagaactgtgagagaatacattcctgttgttttaagccacctagtatgtggcaatttgttattgcagccctaggggactgatacagaaaggaagtgccaaaccaggcatgcattcttgtaaaaaatctgtaaagacacgtgatcaaaaaaagtctgcagttgagaacatgaacttaggggcagcttccctatccactctccccgttgttcgtgaaatcatatcagcttccctcaccttccccgctctcagttgcccattctggtaactggagccccaggtttcctatgaaaaggtacagccttaaaatgaagggtttaagtaattcaaatattgtcctataaaagagggaactacttattctgggtgacttttgaggacagggtaaagaccaaacagtaaaagagaggaaaacaaatttcaactctgcttgtagaattgttggacaagcagaactgatccatggtaagagggatgcctggcatgcatgcctctaatgaaagctggtcctgggggcatcataaggaagttagggggatttctgccatcatcaaaggaatttctattcaaaaaggaaaataaactggatggtcgcagggccctcttccatctgaaagctgactatttgattctgagtcagaatagaaggcagcacactctgaagaggttgagggagacagtgactctctcacaggccagactcagatgagacactgacatggatcatatatggatgggacactgatgcagaacttatacagatgggacactgacgcagacagtatatggatgggacacggatgcggaccttatacagatgggacactgacacagactgtataccgataggacactgacacagactgtatacagatgagaccctgatgtggaccgtatacggatgagacaccgacagattgtatacaggtggaacgccgacacagaccatatacgacatgggccatatacagatgggacactgacacagatggtatacggatgggacactgatgcggacggtatacagatgggacactgacacagaccatatatggataggacactgacacggacgtatacggatgggacactgacgcggaccgtatacttacgggacactgacgcggaccgtatacagatgggacactgacgcggaccttatacggacgggacactgacgcggacagtattcggacaggacactgactcggaccgtatacggatggaacactgacgcggaccgcatatggatgggacactgacggggaccttatatggatgggacactgatgcaaactgtatatgcatgggatgccaacacggactgtatacaacacagaccatatacggatgggacactgacgcagaccatatacaggtgggacactgacgtggactagatacaggtgagaatcagggtctgctgggccctgacctccagaagacatggccctctttccataacacatgaccgtgtccctagccttggctgatcagagtctcaactgttttgactaatgtggagagtacccatattgctgcaggggctacagcagaaagttggttgtataactgggaccacaacaagttatagccatgtgcaagttaaatttaaaggtaagcaggaaatatgagtaaacaagcaaaccaaaaaaagccaggaaagagcagaaagaaacagacttccagtgctctgcttatttatttttgcatatcaaactactctgaaacttagtggctcaaaacaacaactttttctgctgggcttggtggctcacgcccgtaaccccagcactttggaaggccgaggcgggaagatcagctgaggtcaggagttcaagaccagctggccaacacggccaaaccctgtctctactaaaaatacaaaaattagccaggcatggtggggcgcgcctgtaatcccaactactttggaggctgaggcagtagaatcgagaaccaacccgggaggcagaggttgcagtgagctgagattgcgccattgcactccagcctgggtgacaaagcaagacgccgtctcaaaaaaaaaccatttccttctgtttcatgaatgtgtgggttaggaattcagacaaggctcagctgggtgggtcttctgttctacgtggaatagcagaagtcactccatcgtagtcagctggcagatgggctggtgcagcatgtccaggatgacttcattcacatctggcaccatggcagggacagctgaaaggcctggctcagctgaggctgtaaaccagagtgcctccctgtggtctttccaacatggcctctcagggtagctggacttcttatgagatgggtcagggttccaagagccagtgtttcagtaaagaaagtagaatttgcatggccttgtaaggcccagccttagaagtcacatggcatcacttctgagatactctatttgttgaagcagtcataagcccatccagattccagaggcagcgatataggtcccacctctctatgggaggagggtcaaataatttgtgaccatgatttaaaaccaccatccatccagggaggaaaaagagataggaagagttgctttctacttcacagttctcatgagatagcctcatccttaaaaataaaccctcttggcagggcgcagtggctcatgcctgtaatcccagcactttgggaggccgaggcaggcagatgacctgaggtcgggagttcgagaccagcctgaccaacatggagaaaccccatctctactaaaaatacaaaattagccgggcgtggtggcacatgcctgtgatcccagctattcaggaggccgaggcaggagaatcgcttgaacccgggaggaagaggttgtggtgagccgaggtcgcaccattgcactccagcctgggcaacaagagagaaactctgtctcaaaaaataacaataataataataaaccctgtttttgcttggctaacgtcagtaggtgtctgttcctgcaaccaaagtagtcctattatgggcaaaattctgtctctcaaatattcatatattgaagacctaacctcgagtacttcaaaatgtaactgtatttggagatagggtgtttaaagaggttaagttaaaatgagctcattagcatgggcctttacctaatataatcagtgtccttacaaggagaggaaatttaggatgggcacagtggttcatacgtgtaatcccagtactttgggaggctgaggcaggaggatcacttgagcccagaagtttgagaccagcctgggcaacataatgagaccttgtctctttaaaaaaaaaaaaaaagaaagaaagaaagaaaaagtaaaaaaaccattagcccagtgggatcccagctgcttgagaggctgaggcggaaggattgcttgagccaggcagtggggaggtcgaggcgccactgcactccagcctgggagacaaaagaaaaaaaaaatgaaatttaaacacagagggaggaccaaaaaccaaacaccgcatgttctcactcataggtgggaatcaaacaatgagaacacatggacacaggaaggggaacatcacacaatggggcctgttgtggggtggggggaggggggagggacagcattaggagatatacctaatgttaaatgacgagttaatgggtgcagcacaccaacatggcacacgtatacatacataacaaacctgcacgttgtgcacatgcaccctaaaatttaaagtataataaaaaaaagaaaaaaaaagacatggggagaagaagatggccatctacaagccaaagaaagaggtcccagcagaaactgcccctgcccacactttgattttgtacttccagcccccagaactatgagaaattaatttctgttgtttaagccacccagtctgtggtactttgttatggtagccctagctcactaatacaagccctgacaaaacaaatatgccagtgtatgtatcttggtgctaatacaagcaatagggagtctggccctgcaagcctactagttagagcagggtatggcccaagcctaggtagctccagtgtgctgcaagacatgaagtattctcttggcatgggttggctgcctcttcagtgtgcatccactggaatcaggacatatggaacgggtgattcatttcttccatctctactcctggcaaataaaagcatttactatcacctctacaaaggcagcagcatgtttttctttgcaaaaaggaacactgtcctggttcagctttcttacaaacacagacacgtgagtgagaatgtgcgtgcatgtgcacacacacacacacacacacacacatgcacacatacactagccttctatgtctatgttccctttctaacatactttcttccctattccatcaccaatgctcagcaactgggagtcaagaaaccttggtttggtcccagttatacgaaatctgacttaattttcttagatttctgtttgttcagctttaaaatgaaaggattggcccatcaatgatttctaagatgacttttcacacttaagactcgtggttctgcaatctcaacacagtgaaggtgcactaggcaccttcaacacagtgaaggtgcattagggcaataagggttctgctgcttattagccatgagcagttcacttcacttctcccagcctcaatttcctccactgtgaaatgtacttaaaggtgtctggggaccctctgacagtctgacccaagacctactctttatcctgtgaattcactttccagaccttaagtgttctttatcttcttgccttgaacaaaactgtctccccttgccatcttgagccttcccctttcccactcattgctttgctctattgaccccacagtacctccccaatatttatccaacaagggctcctgctcccattttctgtctccatcccaagtcaacccatgcatcaccctggcctcagtcaatgaacttgaatcccttccatttcaacgcccctctcccatgatcagagtcacagccctccaatgaccacctctgaagtctccccatcaacacttccctcctagccacagtagccatcatcctctcatatttctttttcactaactcctgcaatgcccaccctttgtcttgattaagataacctttttcctgcatgctaatttccctcccttccttgcaggcctataggtccttattattcatttaaaccactctcctgctgtcactgtcaatccctcgccaccttgtcccctggtcacatataacccatcaagccttgcagctttgtagtcaatccaacaacgaaccttttccattcccaactctggacaccagaacttcactagagagagaccagtcaactgtgtggacacatgccaacacaaatagatggcctacaacagcagctggcccccaacagagactgaccatcctcccaactgtccccaccagcccttcctctacccccacccccagccccacaccgtgccttccaaacctcctcccaggaacttcaggcccccagcctgggaagctgaccatctcactctcatgggatgacctcgcctcctactttgaagagaaaatagaggcaatcaggaaaggatgccctcatcttcctgccaccccacctacagctgtgcacatgtgcaccgtccttcctgccttccctcctgctgcatgaaagggatgctcctccacctgtcaagggctaatcctacctcctgtgcccaagattccaccccacccctttctccctaagtccttgtccaaccaagaagcaccaccccctctactctatctgtgtcctttcccccaaccgtaggcacctttctgtcagcacatatgatcagtcatgtctcttctttctggaaaaaagagaaagtcctagacctttgtccttgcccttagtagcaacttatttccccacttacctccctgtctgagagacctgaaagccagaaccggtctgcgacttcttccttatttgccacttacagattttaaatgtgaaaatattttagggctttttctttctgttagtataagggaatatgctcatcacttatttacgaaagagtcaaacattgcgggaacatttaaaaaccaaagtcggaatttcttctgcagagaaaacaaggttttgcatgatgctgcacgacttgctctcaggcttctgtctattcatagataggtccatgcgccgagtgctgcacagatgggtccccagtcggtgggtcatcctgtaacctgcctttctcactacacaataggctgtgggtgtttttccatgtcaacaaatgtggagctatatcattattgatggctactagcatcctgtttcgtagacttaccatcatttattgaactcgttcctgttgatgggggtttgagtttgtcatttacacttccccacctaactctccttcctgtcaagtagaacagaaactcattttaagcattcaagggaatctctcagaattcaattgcagaaagcatagacacctctcttctctcttgctctctcccacactctccacttgaatggtctcccatctccgctttttcctgagcatcatttaattcttcctgctcctcatcacaggccctggcctgtcaagtgcacgcacatacacgatcatggctcctgagtctacgcagcctttacatttgctccccagtgaccacactgttcactcacaactctgatgcagatcagcctctgcctccaccatcttctcggatggatggcaaaggttacacccattccagcaggactcagggaaggtgcaaacacaacacacacacacaccattgccagtggcaacagcatcaaaagagaacctcagagaaggtccagggacaagaccctacctaccgactatggcaatgtgaccacagtggctccaccgtgacctggcagccatgaggactggtggtgaggacatcagctctagtatctcacagacctgggtttaatctccccactgtctgatctcaagcaagccacacaagggctctgagcctgcttccctatctgtaaaatgggggtaacactcgctgacttggagggttcatttgaggtgccaccactgtagtgatttgctggcacgggtgcttcggcggggaggaacaaatggcagctgccatcactctcgcaactatgatggatgtgcagtattctgcctcccatggaaaagtccacagaggagcagaagattcaggaacctgccagctaggctggacgaactggggcctaagtaatgacaagaatagaggccaccatgtgttgagtgcccaggacttgattaacttatttctcacataaacccccatgaggcaccaactaggaaatagaaaccactctgagtccttaaaatagagggaacttcatgcaggaaattggctttcttggtgacagaagagcaaagaagccatataaggatagtgagagggcccagagatgagcaataggaagaaaccaccacccctcccccctaggcacagctgggcatttggctctggggtcacccggaagctggaatcacagcatccctgtccagcagaagtcagagtcctgaaggagaagtaactgcttctagaaagtaggcccaaggcagagagagagagaaagaagaaaccctctggctcctctcttactctaccccccaacctcctgccaatgcctcctactggtaaaactctgctggagaccagatgtcacaggagcctgcaaacacagcctgaaagggtcagcctccccaaccccctgccgccactttgatgcagagcaaggaaaaggcatagaatggatatcaaagcaaataggcccaggaccagcacaggcacctttctcatccccacttacacatgaagaagcacagaaaagttaagcaacttgcccaagatcaaacagctgatcttggagagggaagcctgtcccctgagcccacaatcttaactgcaatgttatagcacctcccctagagctgtctcagctcttggctttctcttacttttctcagtcgttcatcctttctctttttttttttttttttctttctttctttctttctttctttctttctggcacagacagcattgctggggcaggcacagggctttggggtttcagcttcagctttgctactgatgatctgggtaaagttacttaatctggtccatcaacatgtatttattgagtacctactatatgttggtttccctccaagcctctgttttctcatctggacaattggtataatgatataagttagtcaagcagagacagcaaggtgactgcatacagtattattacatttgttccaaaaaatgctgctgctcccactcttccctctttcctgcctttttgttcctgccaaagctttaggttttccttgccagactcactgctcatctctgctggtggttcttggagcagatgtcactggctcctattggagctaatcccccagaggagcaacacacccccaccccgtgtcacctcctgccctccaggccagctctacctctgtcagcacctcagtgccccaaactggaaagtgggttgaggggataatgcccagctgtctcccagcttggccacaaggaggaggaagagggtgcggacggaggaggaagagggtgcggacggaggaggaagaagttgtggacagaggagcaagagggaaactctttgtaagtgtgaaaaagcatttaaaatatttaatagcatgagcaacaccagtaatagctttgggcagcagaatttggtgtttgtttactttcactgctcccagacatcctgctgctttgtacaggaaggaaataaatagatgcagggcacattcatgcagaatccatcagccaggcagagtgatgtgatctgttctcagaacaagtcacggtgagaagacatggccagctggtctaagcccctaccccacatgctccccaacacccccaccctgcaccccacatacctactttcacctgcctctggcctccctgcagccctgatgtcaggcacccaggagtttgtttcggaagccatgtatattccatatgcccaatgtatactcccctgtaggaccaggggaagcccatccagcctgccagcttgtatgagatagtgaaattggaaagaccactatgtctcctacaagcactgcagccctggcaagatctgttaccctgagcctcagcctcctcctctgcaaaacagagaaagaaggatttggtgggttgtaggaaacagaagatgcagggtagggtgggtttgaagagaacttcatgaaggaactgtttatggaggtgggagcagggctaagggacccaatgtgggatgctgagacgcccaaggactagataatgtaaagctgttacctccctcagggctgagaggccaccagctcttgctggtgacagggagggacccaccgctaagagctgtcactgtgagagacacagagctgtggcatagacggggcagaaaggaaataccccaacctctcttctcgccctctgatttcctaatagtatctccccttggacaagcccaaaaggaagccagagggcaagctagcccagttaatgtggtctataagggtccagcctcccctgcatagaaggaagggcaaagcatggatctggaaggggaacagccatcacaccctctcaaagcatgtccattaagtgaaacacttggcacagtgcctgcccatagtaagcactcagtgcattctggttcctgttgtcatcattgtcaattgcattgtttggcatgaaaactgcctcttccctacagctctgttcttctgttccctcttcctccagtctagggaattaacttgggtatccctttgaggcaggagaatagggtctggagacaggaagccttcacttcagcctctgattggtcgtgggccaattcttcatttgcatagggctgatttttcatgggcccagtcttcatttgcatagggtgtaactttacttcagcctccaatagggtgaaaccaataagaaatctctaaaaggtacttaaagattttgcaacccgtgctcctgagctgctcgcttgagcccgctcccactctgtggagtatattttcacatcaataaatctgtgcttttgttgcttcattctttcgttgctttgtttgtgcattttgtccaattccttgttcaatgcaccaagaacctggatgactcatagtcaagaccctccactggcaataccttgtcttcttagggaggaaaaataaagatgacaacattcagctccattctaatgatcaaatctcatctctggtctcactttacagagtttattagggtgctagggacaaagggagctgagacaccaagtgctcctttatcctcaccaaagccttacttagaaccctttgctcagaattgatttattgattccatttgatttgtcaaggaatcaaggaaatcaatcagcattgactgagcgcctatgctgtcccctgcacattctatgctcatacccgattcagcttagtagttaagggcattcactttggagccaggccaatcttaggccagctagtaaacttctctagcctccgtttcgtccctgcaaaaataagcctgctgccatcctgcacgctgctgtgaggatagttggagaaggcctggcacagagaagaccttccataacctgtcggtgcaggtgtgacagatgaagaaatgagcatcagaatacacaagggattttccctggacccacactagcaagctgctcttgaacccaggtttgccttggcccaaagccagtggcattctgctctgcaccccacattgtctctcccagtcgacttatccccatcagcagataggtgcagtgtttcaaagaaaccaaaaacattttcttccttcttggtttgagaacatattctgtatttttatttttctgggaattattctgttgttacggacagatgggaacatgggtgtgcagccattggcctctgtggatggcagctgtggacgcagctcagaaaaacatagggtagcaggagggaagacttctgcttcttcagagaagcacatccaagcaaggaaacggaggggctgaccgcagcctgttctttggatttttcttttattgattttttaaggtttttttgttttttgtttttgagacggactctggctctgtcgcccaggctggagtgcagtggcacaatctcggctcactgcaacctctgcctcccgggttcaagcaattctcccgcctcagcctcccaagtagctgggattacaggcactttccaccacgcctggctaatttttgtatttttagtagagacgggttttcactatgttgcccagactggtctcgaactcctgacctcaagtgatccaccagcctcagcctcccaaagtgctgggattacaggtgtgagccaccacacccggtctggttttttctcttattgaaatggccagccttgggttttgagtcaggaccctgggaaccccagccctattcctggcccaccagtaacccaaagctgctcacttccccaggtcccatcctacagatctagaaagtagagccttttctctcttgaaaggctataggatgaagtcaagtcatccaaaagtctgggatccaggaagtccatgttgtgggtgattccaaaatgagctttggagtcagctagacttgggtgtgagtcctgaggtgaactttattctatgtgaccttgggcaactttcttcatccttctggtcctcagtttccccatcggtgaaacagaggtaataaggtataactcccggtgtcgttaggagggtgcagtgaagtcagggcttgggggagacttcacacactgctgggaggtgcatttagggacagggcctcagggagcaaaagccatcctctcctgccactcaggccggggctgccaagagcagcttcccagggctctttaggccgaggccaggctcctgtctgctggcctcaagtctgagggcctttcttgcctgggtttcctgttgtcctcttttactcttttaaagaaaagaaaagaagcatccttcctctggagacctttgtcctgaagctagccggggaatgctagagacagtcagtccatgctgagtgtgttgagccactttctgggtttaaaaaaatatgttattgtttacctaacagttcttctgtgagaaatgggtgtctgttcctttaaacagagcacagggcagacagagtggctccggggttgtttgcagcagagaggagggggagggagaaggaaggcatcctgttgttgagtagaaatgacagaggccaatggacagacagacagacagcagagggagaggtcagcagagacccaagcagtggagctcagctgtttttttttttttctattaagaatttgctttttcagaaagaaaaaatttacggtttttttttttcttttggcctgtattttgccagtctaacccaagatactactggtttacttaagaccagggaatccttttcacctgaactttgctgggggatggcatttcaatgttaaaaaaaaagggggggggtcctgacagcctcaactcattaaactttgtgcagaaggtgttgtgagcttttcctaaattcagcacttgggaatagaaatcaggaataacccatcttaatagttactgaatggccatgcttttcctacattatctccaatcatcccaacatccctgccagagaggtttatgcatccccattttacagatatggaaactgaggctcaggcacattaagagcgtgctcaagcttaggaagatacataggaggcaagtagcgggctgaggtttcaccgtgagtctttccaacatgccccactgcctccttcgtgaactcaacaacaggtccagtggggcacgaaaggggagaggagagaggcagggtggacttcctggctgtgtgatttgccagcctctagtataaatacttctagcaaccccttggctctttagggttctccagcaacaaggaacaagcccaagattgtaaactcccaagagtgggtctaattcaaccaccaccattgtcagcaacgttacagagcactttaaaaatttaagaggcattttgtcaattgccacatcagactgtgtgactctcctgctgacatttaggaggtggcccccaagctcctgcatgatttggtctctgcctcctccagtcccatctccttgctctcacccttgctcactatgctgtccataaatctctcagttcctcaaacatgatgctactggcatcacctaggagtgggttggaaattcaggagttctgccccactccagaactactgagacagagtctgccttttaataagacccccaggtgcacagtgaagtgtgagaagcagcactcttgcacattcagcttttccacctcgggacctttgcacatgcagctctctctgcctagaacactccttttttttttttttttttttttttttttgagacagagtcttgctctgtcgccaggctggaatgcagtggtgcaatctcagctcaccgcaacatccaccctcccgggttcaagtgattctcctgcctcagcctcccgagtagctgggactacaggcatgcgccactacgcccagctaatttttttgtatttttagtagagacggggtttcaccatgttggccaggatggtttccatctcttgacctcatgatctgcccgcctcagcctcccaaagtgctaggattacaggcgtgagccaccgcgcccagccacactcctttttttaaatcttgaactctgagattcatatgtcctgagctcataatgtcacttcctctgaaaagtcccccttgaccttccaataaagttattttttcttaagagtccagttcttttctttcatagcacctattgcagtgtgtaattacataccgacttactgaatgtctgtctccatgaaggctgaggccatgactcacttgcttaccacggacatagtagaagctgcacagacacatgctgaaggaataagcatggtgctgtttctatgcagcatcaaaagagaagttcacagacagtgtgcactgggtatctctaggcatttggtctctgcatgaggcatttggtctctacaggcatttttattcagtttcaccaaatgttcactgagtgctattatgtatctggaggtggagtcatatgtgtaaggaggcctggtgtgacaaagtggatcctagaatttggtgtagcgactcagttgtcttgttcagtggacaaggttgggggctgaatgaaatagcccaggaagtgtacatttctggtgattacaggaacgaaccctcagaaggtgggaaaggaaattaacatttcctaccccccacatctgggccaggcacctacacggttagcaagtgtcaaagagggatttcaaatccactagaatagcatatgaattgcttaactaaaacctatgccttttgccttttgttttaagtaaaattaagaatgcacacagttaaaaaataagataaatatagaagtgtttcatcccttgccacccttagttccatactccaaagataactactttttatctcttttatttgtttcttctggtagctgatttcaaatctctgagtatttttatttacctgtttcttgatttgttaattttatatagtggttattaattctttcttatgacatcaggaagcaaattttactgttttacatcactctcacctcctttatttgccccaaataattatatcactattatatttgcaaatataagttgatatggtttggctgtgtccccacccaaatctcaacttgaattatatctcccagaattcccacatattgtgggagggacccggggggaggggggtaattgaatcataggggccagtcttcttcccgtcctatttttgtgatagtgaataagtctcatgagatctgatgggtttatcagggatttccgcttttgcttcttcctcattttcttttgctgctgccatgtaagaagtgcctttcaccccccgccatgactctaaggcctccctagccatgtggaactataagtccaattaaacctctttttcctcccagtctcaggtatgtctttatcagcagcgtgaaaactgactaatacagtaaattggtacctatagagcggggcattgctgaaaagatacccggaaatgtggcagcaactttggaactgggtaacaggcagaggttggaacagtttggagggctcagaagaagacaggaaaacgtgggaaagtttggaacttcctagagacttgttgaacggctttgaccgaaagcctgatagtgaaatggacaataaggtttaggctgaggtagtctcagatggagatgaggaacttattgggaactggaataaaggtgactcttgttatgttttagcaaagagactggtggcattttgcccctaccctggagatttgtgggaatttgaacttgagaaagatgatttagggtatctggcagaagaaatttctaaacagcaaagcattcaagaggtgacttgggtattattaaaggcattccattttataaggcaagcagagtgtaaaagtttagaaaatttgcagcctgactatgttatagaaaagaaaaaaccattttctggggagaaattcaagccacctgcagaaatttgtataagtagcaaggagcctaatgttaatccccaagaccacagggaaaatgtctccaggccctgtcagagaccttcacagcagccccctcccatcacaggcccagaggcctaggaggaaaacatggttttgtgggccaggcccaaggttcccgtgctgtgtgcagcctagggacttggtgccctgtgtcctagctgtctagccacggctgaaaggggccaaccttcagctcaggctgtggcttcggagggtggaagccccaagccttggcagcttccatgtggtgatgagcctgcaggtgcacagaagtcaagaattgaggtttgggaatctccacctagatttcagaagatgtatggaaacgcccggatacccaggcaaaagtttgctgcaggggcagggccctcacggagaaccttgctagggcagtgcagaagggaaatgtggagtcagagcccccacagatagtttctactgtggcactgcctagtggagctgtgagaagagggccaccgtcctccagaccccagaatggtaaatccactgacagcttgcaccatgtgcctggaaaagccgcagacactcaacaccagcctgtgagagcagctgggacggaggctgtaacctgcaaagccacaggagcggagctgcccaagaccatgggaacctaccttttgcatcagcgtgacctggatgtgagacctggagtcaaaggagatcattttgaagctttaaaacttgactgccccgctggatttcaggcttgcatgggccctgtatgtaatccctttgttttggccaatttctcccatttggaacagctgtatttattcaattcctatacccccattttatctaggaagtaactagcttgcttttgattttacagctcataggcagaagggacttgccttgtctcagatgagactttggactgtggacttttgggttaatgctgaaatgagttaagactttgggggactgttgtgaaggcatgataagttttaaaatgtgtggacatgggccaggtgcagtggctcacgcctgtaatcccagcactttgggaggccaaggcgggcggatcatgaggtcaggagatcgagaccatcctagctaacacggtgaaaccctgtctctactaaaaatacaaaaaattagccaggcgtagtggcgggcacctgtagttccagctacttgggaggctgaagcgggatagtagcgtgaacccgggaggtggagcttgcagtgagccgagatcgcgccactgcactccaggctgggtgacagagtgagactctgtctcaaaaaaaaaaaaaaaaaagtaaggacatgagatttggagggtgcaggggcagaatgatgtggtttggctgtgttcttacccaaatctcaacttgaattgtatctcccagaattccctgagcctcagtttcctcatcagcaaaggggaataacccttatcccataggaatgttgtgagggtcaaataaaataatggtaaggcacaatataaatgtttattgttaggggaaagtgaaaatttacagcagcagacaggatgggtaaccagggaaggcaaagaattggaaaagcctttttcagcattttgaaaataattagatgggcctgctccatgctagattcccaccatctctggttcaagcatcagcaacatgaattctcatgtctctgcagcagtataataataccttacgtttacatagtttgttaggcttgcaacatgctttctcatgcattatcttattggatttgagtcttccaatatccctgagaggcaaggagtaccagcatccaaatttccattttatagacaaggaaattaagagtcagcatgatgcaaacatgatcaaaatcacagagctgggaagctctgagaccaagctctagtagaactggaaccaaatccaaaccttctgagacaggaagcttgtcactgccctgcactgtgatgccaagaaaggacatctcagggtcaagcgtggtggctcgtgcctgtaatcccagcactttgggaggccaaagcaggaggatcacttgagcttaggagcatgagacctgcctgggcaaataggagactccatctttacaaaaaatataaaaaactagtcaggcatggtggggcacacctgtggtcccagctaattgggaggctgaggtgggagggtcatttgggtctgggaggttgaggttgcaatgagcttcaatagtgacactgcactccagcctgggtgacagagaaagaccctgtcgaagaaggacaaggagaagagaagagaagggaaggaaggaaggaaggaaggaaggaaggaaggaaggaaggaaggaaggaaggaaagaaggaaagaaaagaaaagagaaaagaaagagaaagagaaacagaaaaggaggaggagggaggggaggaaggaagaaggaaggaaggaaggagagagaaacttatgcatgtgcaaaggttattgggaacaagtgagtaccctcatacaccttcctggacctggaatgtcttaatccagagatggctagctggagacccactaggtcaatcagcatgcctgagagttttgttcaatagtagctcagtgttctcagaagtgctctatgtgtcaccattcagacatacctaaacacagtggatgccaccccatgtaatctctccacctctgtgcttttgtcactcacacaaggttccaggccttagaaaggagcatctattggctgagcctagaaagggcacctgtgtctgagctgtcaggagcaaagataaagaggtatttcttattcaccttccacaatgggaagcaagatcctccatcccaggccaccctgtgtgactgtgtattacacaaaggtaggctaaagaggatacataggggctgaaacccagcctacttctgctcttcgagtcctgtgtcctggcccagggcttggtacatggagcttgtactgaattttaggctccagctaccctctcagctgagcactcttgtgcagtgtacaatctgcagaagcaaacatggcagccctgcttcctcagaagagctggcaacgctagatgccactcccacatagcaacaattagagggagcccagtcatagctgcccttctgggacagggcgcacactcccacatcaccacactccccaccatgcctacctcacttgtttgtgtcacctgccagtcccctaaggcatttgagtttatgacctgtctgaaacaatattttttttttacattggcttatccaggtaattagtttcatggtctatttctgaatggcatttttctttcccacccaacccccttttccagcagtcctagttaatctatttatttttactctacctctttctaaaaatacatacaatacaacacgattttttaaaagtcagactcctggtaatctctggaatgtgggaaaagcactcttaccacaaagttatattaagaagtttaattatcagaaaattactgtataataaatatatcaaacagtaagtatgtacactgtatatgtacactgcgaattcctgggcaacctcagtctataaacccattcacctcacccacaacctcaaccgactctttattctttttctttgactggcacgggagactttgagatacacttgcttctgtatgtatagcctcccaccttttccaggacccactaggtatgctgagttttccaggcagtcatgagaactttgtcagttcatcccaaagtctatgatcatttctcctttctgttggtatcagcccactcccaaattgtttgccatttacttttgtaagtcctgtctttaaggaaaccatggggctcctggttgctattgtaggttgtctcagtcagccactactgtgtaacaaacaaccacaaacatcacagtgccgtacagcaggaggtatttctcgctcctgtgcctgagggtcacatggggtggcttggcttccggccacaggtctacaggtcacctggggcagctttgttccaaatacctttcatcctactgggcttatatcgtgtttttctcgtggcaatggcagaaatgcaagacagcaagccctacagcacaagcacatttcaactcctgctcatgtcacctccattaacatctcatttgcaaaaacaagtaaaatggcaaggcccaaagtcaagggcagggaagtgtgcgtgccccctggagataggttgaaggggaaggagtgaatatctacagacaatggccactgtttgcccttttggtcacaaatattcactcctttcccacacgcaaaatacactcactgcatccctaggacactccaaaaatcttatccaatgctggtattgaactggaaatccatgttccatgccagatctcactgaggcttctcttgatttgataaggacccaaaaaatcaaaaagacaagttgttttccatatgtatccaggtgcggtggaacaggtgtagaatcagaaaaacactgctacttggaaagaaaaggaatgagagtcactcagcactcactgggctgcagcaattctgatgttctgctgggaatttttggccaggtcctcctaatccaggagttgagaattttccttgcctggccccctgttccacactcagtcctttcttctctgggttcttggctctgccctgtgagaggttttctcttcccatcagccttgatcacttcaaaagagcacatcggagaatatgacaatgaccatactcttagtctgcttcctgtctataagaaggtggggccccagaaatttgtttttatctccaacagtttcattttgttttagacaagcctggtggtagttttgacagtaaactctctcaaaaattttgtgggttttctgtgcattagattccattcaactccaggcaccaaaagcacaaaattcacaatttcttggagacatgcttctctttgtctgtagactcacactcttaatttttctatgagttcctttgtctagctgaaagggtacactggacacttgcaccttaacaggagctgcatcctagcggatgtcagaatcaaaaactttaaggaaagctagtgcaattgagcaaaaagttttactgagggtttccttgtggccaaaggaaaacataatgagatgcacaattaaaatatgcattctagtttgttaattgaggcaccttttttcctaaggaccatcaagtacagtaagcaagataaaattcagatgcagaaaacttcctacagtgaagacaacgtcccacaggcctgtgagctcaataattaccttgggattaaaaagaagggccttgccgggcacaggggctcacgcctgtaatcccaacactttgggaggccgaggcaggcagagcacgaggtcaggagattgagactatcctggctaacacagtgaatcccatctctactaaaaatacaaaaaattagccaggcatggagttggctgccttgcagtcccagctactcaggaggctgaggcaggagaatggcgtgaaccccagaggcggagcatgcagtgagccgagatcgcaccactgcactctagcctgggcaacagagcgagactccatctcacacacaaaaataaataaataaaaataaaaaaagaagggcctttcagagttcatgagaacctcaagctaaggctttatatcctaaaggcagcattctattttgtgggggagattggaacttgggatgagggaaaaagaaaaagcattcaaagcatcttccaagagagaaaaactcaagatttaccaaaatgtattttattttgtttttcaagctgcaaaaagctgaggagaatcataaaattatttagcttagttaactagagagcaaggaagaagatgtattatttcagtttcatgacttgttaatttgcaggttttatcatttgtactctaacgacttggggatattacttggtctgatggctgagggctgatgcagagatttgttttttgagtgtgttagggagccaagatcctcggtactcctacatcaggtttagggaatagtcaaccactctggcccacgagcaagaggctataatgtctcttccagcctggaggggcaggatgccagaaaaggagagttatgacactagtaatagaaaatgttcgaaagaggctgggcgtggctcacatctgtgatcccaccactttgggaggcagaggtggcaggaccacttgagcccaggactttgagaccagcctgggcaacataggaagaccctgtctctacaaaaaatttaaaattagctgggtgtggtggtgtgtgcctttaatcccagctactggggaggctgaggcaggaggatagcttgagcccaggaggttgaagctgcagtgagccaggatcactgcactcaagcctgggcaacaaaatgagatccagtctcaaaaaaaacaaaaagaagaaagaaaagaagaaaagttaaaaaagagaagcttcttgtgttaaaattttctttcaccatatggaatgagatttggttcctgggacaacccattcccaaactcactgcctattcggggcctttgtaaaacagtgccaacccctccagtccagtagtttatattattacattttgttctagaagccaggcttcaaaattctgggggctgctttgtcagaggaggacggggagatgcagacatcatatttatggcatatcctttgttaggaatttcagagaagtgaacttagttcggagctaccttgagtatgacactatcctccttaatttgactctgttgggcttgaagtggaggtgggggatcagaggaaggaagacaggagagtttactggatccaagaggtaaagttgtaaaaccacctaggagctgatgtcaccaatacaaggggcagttttgtctcctcagcctgtgttctgcctggcccgtggctgagtgctgaagccaaaatttggtcaaactctttcccggatttccagctgggtctcccctgtcctggattactggcattttctctacttactaaatgtgctttgtgatctcagctagtgcgaagcagaaaacccactgctaaacagggaagcaactgaaaacccaaaatgccagcatgtctagtcaagtacacggtaatgcactaccccgttcattcattaatctctccattcacaaatatctgttttctgtccaccgcagtgtgagggctttcaggtctagaagtttcattcagaactgaaaaaggataaccagtggtggtcagagtggttagaataagggaaagtgccttcagtctagacaatgtggttgagtgtagcctggaggcagggtctccattagagatccctctccagctggggtatcctaaagagtggcatgaagaatgagatggagccagtaggttagtaaaacaattaaagaacaaaataaagagcattctcagcactggcccccaaggaaggttacggattggaatagagcacagagagcctcatctaaacctcgccaaagagaccaaccccagggcactgcggaactcggggcggcctccctgctgtggggcaggcatccttggcgggcaaggaaatcatcaaaggctccagcagcaggaacgctccagccatcagacaggagaagacagatttcctctaaaatgtgcctttaaagggagctcatttgccttcatgggccccgggaaagcctaagataggtgccatccaggaaacccagactctttaagatcaacacggtttaatgcagcataagagccttaggtcagaccaagaaatgacttcctgactgtaagggcttattggaccatgaaagcggactcctagagagactgtgaaattgccttctttcaaagtttttagattttttttttttttttttttttttggtggtggggaggggaggcagtggattgagggccagcccagaggctggcagagaggtttgatgaattctcaggccactccatctcaccccaggaggcactttccagcctgagaactgaggtttccccctttctgggtagatcattgggtccagaaaaccagcaggggcagcaaatattaaactctgcctaaattgctctaatgtccttgggggcaacaggagtaggattaagccttcattttttactttcttcttttactttccagagatgggtcaactgggtagcaggctccaaatcttcaaacactaaataagaaatgttgtcaggctggaaaccattttaatattttaaatacgtggggtttctccagcattgcaacagctgtgggacgtaaaataaaatccatttctctccggcccctgggcagctctaaagtatcaaatggtcaatctggatgatgggaggtgggaggtagaaggtgagaggttgggggcttggcaggaaaggttggggcagaaagtgcattttcttcctgttgtggaacatttttttaaaataatcagatccaaaccctcagagtcctggggagctatagattttgtatcagaagaatgtctgagagttttggaaatgctcccaaaatttgaatacaaactccctgggtgacccagtcagatgcaagcaggctggcctccggcagctggacactgatattcactggtttgaagaagagagaaagggtgggaggatggggtaggatggagccctttcatctgggctgttgggatttgtgatcctcctccaggataattctcaatgggcttgtaagcacaattgccacacagagcagatgccacagcctacttggttagatgagtccacgtatttaatgaatatttattgggcccttgcattgcttcaggaagtgagataaggggttggagctgggcttctgatggtggcaccagtggccctgatcttacctgatcttccctccctgttatgtccctatccttggtgctttggagagcacagaactattcattcattcattcattcaattattcaatgccttcagtaaatactcattgcactcttcccaagagctaaaaatacagcaaggaataagacatttcccgcccactgccctgctcctatgggcctcacatcctagtgacaggacacccataaacaatgaacaatgatatataatagagatacatagatagaagaatgcttatatttatcaatagaaaaatgattaaatttatgtatgtatcaaataattttaaatggtgttgagtgctatgaagagaacaaaccaggctcaggtaatagagagtgactggagtgggatccaatattagctcaggtgggtgggaaaggcctctctgtgacacgtacgctgacacctcctgcatgtccaggagccagcctggctcctgaagtcaggggaagaagctccagacagagaacctgccaggcgccaaggccacggagcaaaaaggagcttggcatgttcaaggaacagaagaaggacagggtggctagggcatagggaaggggcagagttggaaagaatcatatagatccagctggaacttaacccagaattagtgccagctagaaatttagaggtcactggattcaattcccagatttacacttggaaaatctgaagctcacagagaaagtgtgactctctcagggtgacccaacaatcgggagcagagccaggacaggtccctgtgcctgtggacactcctgtgtagtgtcactccactgttcatatctgtcacatgtgtcaaggctcacgtgtgtgcagcacagaccctccagctgattcctgcacatttagtgacccccggagaccagcgtggcccctcatggaggagtcaagtttggaaaaaaagcaacagcagcagaaggtggtaaaagagaagaatgaagaacccagacttcagtgttagccagagctaacctcaagttcacactgccccttattacatctatgaccttggagacatcatttaatctctgtgagcttcaatctcaccatctgtgaagtgagatcacagtcccaccccatagatgtactgtggggcgggtatgagatggtgcatcgggaagacttagcacaatatcaggtgcatatgaaaagccccgttacagggtcattgttatatgattattatatagttccaggcctaaaggaacttccctcatcatgctggagaaaacatccatgcacaaacactgcaaacactttactcttcttcatgcactcgccaaatatttattgagcactcgttctgtgaaaggcgcttgcactgatcaccagaaatatctcagagaacaaacacaaatgtagccctacaaatgcagaggcaggcaactatccacatagccacatttaaaaaaaagtgcaaaattgtcatcaacaagtactaggagagggggatttgcagtactttgagagaccatcaggatttcagtgacttggtcagggagatcagcacaggcagcattaggtctccctgagaaagtaaagcttgggatgttacatgatgagctgggggtagccaggcaatggatgagaagcaaaggacagtgttccaggcagaaggaatggcatgtcttaagaccctgggatggcaggcgcacggtgggtgtgaataactgagcagaggctggaccactaagatccttgtgccaagatagggagtttgagttttattctgagaatagtaagaagcattaaaggagatttaagcaggatgcttggaatataattttgccagtctctcaaatgtattaattcattcaacaaacatttactgggtgctttgtacgtacaaaagactgttcaagacacatgaggatagagaattttccccagccacaaagtctcttacagaatagtggagcagatagacatattagcaactgttaactatagaggaaagagcactggacttgagtattaaagacataggttcaagtttcaattctaccttttattgaacaactagagtttcatgaggacaatgactgagtttaattatgtctgggacccatcacctgacatgcaggagaaccagcaaacttagaatgattatgtcaccttgggaaatatcaataagagaagtatcaacaaggcctaatttttgtttcatgttctatcatctttaaagacctttcacatactggatcttattttacccccacaatatccctgttaatgttgtggatatgaggtgaattcagcactggctacatagtttgcggagccaagttcaaaatgaaatgtggagctctttgtccaattaataagaatttcaagacaatgacagcagagcattaaactaagtgcaggactgttgtgggcaagggatccagtgtcgctgcacgagttgtgcatacataaagccagccctgagtaagttctatttcattcactttacagatgagaaaaccaaggcacatggtagagtgactctgtcagtgtcactcagctcactgaaagagtgaggcctcaaaataaacccaggacttctgacttcctgctgaaacaggactgccctggtttgtgcctgagttgcagtgttcctggaagggcagtttgaagcatctgtttaaaaggtgatatagacaaagaaattgaagggaaatgttcaggatgctgccccgtgtgaaacctttcaacaattcccactgctttaggacaaagcctaaaggcttagactgatgcacagagtcctttcctggtctgacccctgattaaaattttccagctgcactgcccaactctgcccgctccttcaaaatgtgctttacaacatacaccttcttgccatttcccagctgggccttgctccttctggcctccaagcctttgttcctggccctctctctgcctcagatgctgtgttatgaagggggactacaagtaagccagctgaggaaggcagcgggatgaggaaaggcagctgaggcacagggaaatcatgactaatttttctgcatctttggaacagttatacatcctgccatccatccacctttccatccacccatccacctatcacctattcatttttccatctaccctttcacctatagacccatcccccttccactcatctatccatccatccatctttcctccatccatctatccatcatccatctattcatacactcatccatccaccctttcatccatctattcatccatccttccattcattcatctatccatcatccatctatccatccatccatctatctattcatccacccacctacccacccattcatctattcattcacctatccatctacccttcaatccatctatccacccatacatgcatacatccacccatccatccaatcatctttccatccctctatcccttcatccatccatccatatttccactcacccacccatccatctttccattcattcaacaattattcacttagtctcatatgctatatgccaggcactatgtgaggcactggagatccatcaatgaataagctacacttcctccccacaacagagctcacaggacaaacaaatatcacccatagcttgaatccccaatttcataacctgtatgaatccagactcccttctcacaacttatggaaattccactttcttcttcttgatcctgtctccattcctgtgtctataggtgtcatcccaggatggtcttgaggcagctgggacacagttctaagcccctttaccatttttccacaagaaatacaaatccagcagtgatgttgtgggtttagtgatttgactgtagatctgagaagctactataaaggattatgttctacatgctacagccttccaccatcttgctgctttcccaccaataattgtccagttccccaaagcccaagctattgacatggaaccctccctgctgcacagactcctcgaagtgtaatctagtcctcactccctaatatgacatactgcccctgccccaggacagtcagctgtccctcgaatctggtaaatataatgcgctccaactcatgacacatgtaaatagactgctacaatacagagaacagagagctctacaacagaggtaagttcaggatgcacacacagaggtggcagagaaaagccaaactaaactagtcttgggcttcgagagtggcttctgggaaagattcttagataaagagaggagtgatgaagaggatatttcaagcacaacaaataacaaggacaaagacatcagaaagtttactgtgctttgcaatggggacaaaagtggttcaataggactagaggatacagtacggggagcagcagcagacaacactggagagggaggcaggagggggttgcccataaaaggtggggcagtccatgctcgggactctggactctaagctacagcagcagaactgctactgagagctcctaagcctagaagtggcttgatttgagaatcttaggaagactgtaggggctggcatatggggtcactcaaccctaacctcaaggctgtgggagcctccagctcaaggccaaaatcattacaaggcagcagtcatttccccttccaaggagtaggtatggaaccagaccagtcctggagattaaggttttgtgataaagacagacagtcagagcccagagtggccgtccttgtgtccccggggaggtggcctaatgcccactctgttttctaacaacttttcttgggtatgtatcagaccaaaaactaggtccgcaagattcacgagacctggtcagagaattcatactcattttcaaatgtctttggtcagcaaaatctcacatgcactttttccagagtcctttcctccccttcacatccccactcccacccagctgctgctaattgtacaagccacatgcactacaagggaaatggaatcagtctggtcctggttcattcacctttgaatcctcaaataggctgttttgtaagagaccctagacttccaagacaccctcgcaggatcccttagacagcttcttgttttgaatcaggaaattttattttgccagaacttgatgttcaagctcaatattaatgtcagaacccacgaaatgtgagcgggttctaaatttggaaaaacatggtctctaatatctccccaaagcattccttcagctattgactttggaggcaacttctctatactatgtagctgtccattgtttgctctgaatgacacagagccttcaaacaccggaggtgcttactcagcggatcaatatatcatcacccccatcatctgcatacattggttgaacatcgtagagcaaatccaacatacagcctgcttcctgtcttggcaaagccgccggattgagtcctctttccatgcaacacttctgccctgacttaaactttgactccagtgtcctttctgagctatttgcactgtgaacacagcgcctaaaaagatttattaaaaaaaattaaaaagcagggggcgagtgtcatttttagaaaggcgagacacccaacacatcctactctgagtagatttctttgacagcttgtgatgttgcctgaatggtaaatatatcctcagactccaagtaaatagtccgtggcatgtaacttgggtataaaagaggaaattttacacaacgtggccacagatgccttgtcatttcccagaaaattagagggtcttccagtgaccctgtaaatttatctcacaagtactcttccacaacttcaggaacagatggggcctgttttgataatgttttccagtccccatagataatatgctgggggtggcgggagagggggaggagcaagacagcctgctattgctcccagaagcacagcctgtgggcgatctgtgtctctggtcatctgaaagacactttgttagcaccaagcatttcattgctgaagggagcagcagataattttttttattgggtagcctctttactaaaggttgaagatgtgaaaggattggctaaaagacaggttcaaacccagaggatgggctggagtcaaagagagactgcaaggcatcttgaaggcatccttctgcctccaggaaggatcagagaggttttgaacccagaggaagatttcacagcctctcgtggcaacttttttcagcatctctgcagagatggagaaatacaaatcaatatcttccaggtagtaactattggttcaccttaacccaggcccttccatcagtaatcataatagctaatatcgactattcccaggcactatgctgagcacttgatgtgctcaagttatattcagtgttatattcaagacatatttcagtgttaggtgaaatatatcatctattcctcaccaccctggatgccagaggaggaaaatgaggatcaaagagctcacagccacgtccagtgtcagcagctggtgaggacagagccgggagcagaggtatgatctgtgcaagtctcttgggcgctctatgcctgggtttccttacctgtaaagtgaatggacctagtaacaatataataccaaggcttcaagggctttttgtttttgtttttcactttttcactttgtcttttttgaccaggtcatggttcttatttccaactctcgtcattcatttgtccattccacagtgttattgagtactttctatttatgtctctgccatttagacttttaatcagagcctttatgattagccaattcatcgcctcttcacagtgggctttacacatcattatcatgcctttaacaagcatctcgttatgctactgtctgttttacaaaaactaactgatatctgttgttatttggctgttcacaaagtcccttcacatacacttactcatgtcatccttatgaaaacacagcaaagaaaagaaaaatagatataatattgtttattattattattttcctattttacccacaagtaagatccaggcacattaagtgaatgctggagccagaattcaaccccagtcttgtgatacataaaccggaaccctttccactaccacccacaaaataaatgtggacatggccttccgggagctgccacagaacagcagcgttcatagaaacacaccacaagcacagagggtggggaagcttggtggttaagcacacggactcttaaattagacagccttggctctaaaacttgcctctgacactcaccagctggatgaccttgggcaagtgacttaacctcttgatagatcagtttccttatggctaaaaaggggttaataatagtacctacctcagaggatgactgtggaaatcaatgactaatatacataaagctcttaggacagtgtttcaatttaattaatatcatctaattgttatttgtcttaacattattatagatgcacctgaaagcaaacagaggctgtgaagggcaggacagagttgagcaaagaggcctacctcccccacggggaagaaaactaactgaaactaacagtcaagagatgtggttctattcctcattctgccacttaccatctgtgcaatcttgaaccaatcagtcactttactccatttaggtttcctcatctgtcagatgagaaaagtcaaccagattgggtaggggaggcctagcaaatgtccactgactccctcatgtcatccagtgcccctgtagactccgaggggtacacccagccaccccacttgaattaagactgactagtgaagatacccacttaagaccaggttgaccagctcatcctggtttgcctgggactttcctagttctaaaatgaaagtttcatatcccaggaacataattccagaaaaaccaggatggttgatcatcctaattaggtaaaaaattatatcatctagtccatcattttcccaaactttgctgcttatgttaccaccaccatatattttgccatagctgtgtagggaactgtaaaattactcaaatacatttacttcagaagaatatattacatcactactgccatagtcaggatagaccaggttagctgaggcaacagacagccccacaaagtagggggctggaatatgcagtgaacagcactacaattgtaaaagcaaactagcgtcgcttgccataaagtgaaggaaaaataaaaaattgatgaaaataaaacaactatcactaggtagcagtgctggctgaggttccgtctggccccaggggcctgctcactgtttgttaaaaaggagagataagtaagcattaaaaaatcctggaattttctccttttcagagcaggattaaaaatgaagtaagttcatcactctgtgatttaatgtaatttaatgccatgtctgtttgctacttaacattatctccctgccatcagcagagcacctcacacacatttgggaagttggaatcagagagagtgtaaaggtgagaggatgaaggctcggtcatccatttaaatttaggggcactcctccttccaaagcagctcttcccactaattaatacctaatccagacagggcgaggtggctcacgcctgtaatctcagccactcgggagtctgaggcaggaggaccccttgagcccacgggttcaagactaacctgggcaacatattgagctccctatctctacaaagaaatttaaaaattagccaggcatggtggcatgcacctgtagtcctagctactcgggaggctgaggcaggtgtgtcacttgagcccaggagttcaagcctgcagtgagctatcatcctgccactgcacttcagcctaagcaatagagtgagactctgtctccatttttatatatatataatattatattatatattattatatataatactacatgttatattaatttacttaaataaattatatatattaatatattatttattatattagtatacataacatatatacaaatatgtataatacactatatatatatatatacacacacacacacacacacacacacacacacacaccaagtcagacaggacatcaattgagagaagatgcccttacaaacttgcttttttcaggaattttcgccttgccccaaaggctacctaggaagtactataatgggctaaaggacagagaggagcacccaagaaaggtccttgttccaacaagatcacatgggaagaatttcagcaaaacaaagcagcagcaaaggacctatggcttttcgacctcaacaaggttctgccaactccccaaagcaagctaagaatgactgaagatacatcatgtggctgaaatttcaagtcactactatttcttccaaaaacataaaagtataagaaatggtttgccacctaagattggtttcccaaacaaatgccaaatcatcctgtaggagagcctaaccccgccatgtgtggtcttcccttatatggcccctccaattccaggaacgccattcaccttctccattccagcactgccctgctcactcggttgggacctcacccactccatggcattaaataccatctataagccaatgattcacaatctacaagaccagcccagcctatcagctgcatgccagaccctacctgacacctgcccctggacatctcactaggacctcaatgtcaattgaacacatgacctgctctgccccaaacccactcccttccaccatccactcttctgttcaaactcaaaacctggaagtcttctgtgcttcctctttctcccttgttcccacatcctatcaattctgtcacctaaatgtttgtagaatccacccaccttctctgccctgacccctcccaccctactccaggccacattcatctctccccgccacctactacagaggttcctagttaatctcccatgctgccttggcttctctctaaccctctccgctccatactgcagataggtacaagaggcattttttagatgtaaatctcattaccttcttctccttgtttaaaatacttctgctgaatcctattacccttgtaatgaatcctcaaagccttactgtggctatcaatcaaggctatggatggcctaccccacccctgccccatctctgcaagctcacctcaactcactctcccttccctgttgttctctccactccaaccctgcagggcttttctctgttttctcaaaccttccacatgttcaatttcagggtctagcacaagcttggaacactccacctcctctctgcctagctacctgctgttcattccagacagcaatcctctggaggccttccctgatctctgggccaaaatagggtcccctcacccctatataaactccatagcactctgagcacactggccttctccttctccttcccaacactcagcagaacagtaattatttttccccgttaggctgcatcctccatggagatggacccaccaatatccccacacctagtactgtgtccatgaatatagcaagtggttcctaaatatttggagactgagtggtaactgtgagaatcactcccaagcagcctgagtccccacccccacaaagagatctgagtcttcctctccatccactttctgaagaaaactcaacagtatgcattttggtcttggagaacgtggtgtctcgtgacaccactgggaatactgacaaaaatgtggctgtagtgggttcacccagctctcaggaaggaataagtgtcaggtcatgctgcatcatccacaggaagagcatgagctggtgctgacagcgtggggtgtcccaagcctttggtcttgggtttctcttcctagagtatttatatccatccggagaagccggctggcatcattaattgtgagcgtgtgtccactcaaagcagccatataccaaatatatcgagtatcaagcctaatatggatatccttgttgatttatatattgttaataagcaacaagaagtgaatgcctaaggtgggatgccaaatgtttgtcttcctttgtcttctcaaacgtgcaaggttgttggtttggtgtactgttcgtttttcatggaagaatgactttttaaaagagaaagagggagttatgaggcccacagtcatttgatgaactgaataaggacaaacatccaggtcacaagtggcagcaaagaatgcaaattctgtgtccagtgtctcaaaataagaaccactaacacttagtggagatttgtgccaagcaccattcaaaacaaatacactaattcatttcatcctcatgatacctctgagaggtaggggctactattacccccattttgcaaatgaggaaaccaagacccagagaggcttaagtgacagtccagtttagcaagcagtagagttggaattttcacccaggaactcaaactccacagttcagaagtagtcgggccccatggagatccatccagtccaaagcaaagacaaacccaaaggcccacttccagaggactcagactactgccctaatttggtcttttctctcttgagggccacagagaaaccatagccacagtgctgacctcaaggagtttacatttttgcaaggagatcaaacaagagcacaatgtatttacagtaacataaattagtaagtgtgaaatgccatgcaagggatttagacgctgcccaaggagagagaggtctgaagcatcgactgatgggtctgtcttcctgctctgccgttgccaggttctgtaactgtgggcaagtcggttgcccccgctaaggataaactttccaatctgtaaaatgggatgatgatgatgatgatgatgacgatgatgacgtcatttctagttcctatctcacagggctgatgtaaggattaaatgagagaaagcatgcaaagcatttaggacagggatatgatatgttcagtatgcaccggcccttatttctagcagaggagttcgggatatcatatattcactcacaaacatatattaagcacctcctaacaatgcactaggaactgtgccaggtgctagggctacaaagaagaatgagacagtagccaggctttcaaaaagctcatcctccagagaaagggacagtgggggaggcaggctgccaggacagtaggagtcttgagtccttgcaaaaagaatcggagagggtgccttggaggagggtgacgggaatgcaggaatggggtgagggtgtttcccacatgtacaaagcaacggcaagcaggcagcttcagggcttcctatctgccaagtgggtaggattggggatgggccttgatgaccacacacagttgattccagggacactcagttcgagattccaggcaggtagctctgatgttgtgaagtctgcctccaagtcctgaagttctctttacctccagactcagcttgagacaagagaataagtactgaacattgaagtagaaatccaagtgggtttttcttttctttttttgtgccctgttatttgcctgttagctagactgaggataaaactgaatttatgtctcaccaaggaggcacaggaaagtgaagagagagagagattatacagggtttttttttttttccttcaaagtgtctcctctgcagacgcctggtgcagctctgtctccggggagcggttcaccctccagaaaatatgacactttatttcctgcccttgtttgctaacacaccccattaccatccatctcagtttcatgtaactgccaaccggcattaacgccctcctcctcgccgaggcagaaaatagaaaaggaagaattcagcagattttccccggtggccccctcggcggcaccaagataaccagcgcagaaaccacaattggatccttattcctccagcccaggaatgcgaaggacgggacggtttaaccgccttctgcattttcctgcaaagagagccggcttgttatttcggttgtctgggctcccttctttactacggagaaagatacattaattaatttttttttttaatgttaggcaggaaatgttgcaaactgtcaagagctgtcagcgggcgcctgccccaatcaggtaagcggcgcgcgggcgcctgcggcggagacacactgacccctagtggccgaccgggccctcgcagcccccgcgcccgccctcgctccgggcggccagagtcgcagtcaagtcgctctttgcacagagcagctctgtgtggactggcgggggtgtggccggtgctgtgtctccaccgcccgccccaacgcaagcacgcgcgcacatacaccccatgtccatttgctcttccaaaccagagaagcaatttctgctctccttgtccaattccagagaacacagatgcctgagaaccttaagcagtgtgcctctgtgctgttgctcaggcatgtgcctctgctcttgaggagtgacgggaaagacagacagggtcccagtgtgacacagggctgagaggaaggaagggggtggcgtttgtggagactcccagtaccagacactgtgcacacggttatcccttggagcctgatgatagccccagatttggaaactgaggccccagctgtcacatggcttgtccaggtcacaaagctgatgtttttattcatttgtgttgattttaataaacaaatgtttacatagctcttgtctgccaggctttcttctagtgctttacctatattaaaattacctgtgtggaatcctcatcacaaccctgtaagtactactattgcctccatttcccagatgagaaaaccgaggcacacagagaggttaagtaactagtgagcgtgagtctagtgtttaatctaggcagcctggcttcagagtgctctcagccactgcactgggctgtgtgtgtatgtgtgtgtgtgtaccccatggatactagttaaaaggagaccaggattctagtctgcacatcacgggctcaaaaacccaagctgttctgcgtgtacctcctttgttccctaaggatgaagtgctacagcaatgcaggacaggcggcagtaattctggctgtcgcaaaaggaaggcaacttgtggaagaggtgtctgatgaactccttgaagacatagaccgtgtcatcaccttcagagcctcattcgcgcctggcgcacagtgggtgcttaataaaagctgaactggactggaccttgagggaaggtccaaggaaggtgtgaaggcaggagggaggctaagcaagttgcaagaaccacaacactgccgtagagaaacacaggtcccctagcactccgtgaaaacacattttcagacacacccacactgcatattctctttttggccaggacgaggggatgagctaactgcaactgagcagctcctactccacagtgatgcgattaatgccacctaaaatgtgtgtccccactttagtttttcttatttgcatttcacagtagccccatgaagtaggtataaccagcctctattttaacatgagaagatggaggccttttccaaatggactaagtaatgtgtctcaggttttcctaataagcaaagacctgcaaccctggcttcctgactccaaagcttatcccttctcatgctgttgctgtcagccaggaccccatgcgcagaaagcccagcctctccatcccccacccaagcagctctggccttctctcaagcagccccttgaactggccaggcttgttcctgcctaagacctttccctgagccattccctcagcctgaaatgcccttcctgtacgtgggtcttcacacagtcggctccttcctgtcattccggtgtcagctcaaatgtcacctcctccaaaaagccttccttgtccacccaacctaaaatagccttccagtcactctgttgcatcacggttttatatatttcccagcaggtattaatctccggtaatttcttattcagttactattgttagactcatctcatgtataataaggggtatcaattacagagtgcaaaccgataatgtcctaagcaaagttccaaaagctttactcacagtgagccatgaaattttcacaaccaccctttactgtggatgctgtccttaaccctcattttacagaagagggaactgaggcaggaaaggttcagtaacctgtccaagatttcaccctgagtaagctgtgctctagtcactacaaaaacatcagcagaatttgtaaatggataaaggacttaaatagacatttctccaaagaaaatatgcaaatggccaatgagcacatgaaaagatgctgacattattagttgttaggggaatgcaaatcaaaaccacagtaagctaccacttcacacccatatggcttaatttttaatttaaaaaaagggggtggcagggggaaataagttgttgacaagggcatagagaaattgtaacacttgtaccttgctaatgggaatgtaaaatggggcagccactgtggaaaatagtttgttgtttcctcaaaagttaaacagagaattaccattcgatccagcaattctactccaaggtatataccctaaggaattgcaaacaggttctcaaacaaaaacctgtacaagaatgttcatagcagcatggctcacaatagctaaaaggtggaagcaacccaaatgtctatcaactgaagagtggataaataaaatgtggtataaccatacaatggaatattattcagtcctagaaaggaatgaagtgctgatacatgctacaacattgctgaccttaagaacatgtgctgagtaaaagaagtcagatacaaaaggccacatattgtatgattcaacttatgtgaaataccccaaataggcaaatgcataaggatagaaagtagattggtggttgccaggggctggaaggagggagaaatggggagtgactgcctaatgagtaaggggtttcatttaggggtagcaaaatgttctgggataggcaaggcgcagtgactcacgcctataatccccgcactttgggaggccgaggcgggtggatcacctgagctcaggagttcaggaccagcctggccaacacggtgaaacaccgtctctactacaaatacaaaaattagctgggcacggtggcatgcgcccatagtcccagctactctactcaggagactgaggcagagaattgcttaaacccaggaggcgaaggttgcagtgagctgagatcatgccactgcacttcagcctgagagacagagcaagactctgtctcaaaaaacaaaaaaaaaaaaacaaaaaaaaagttctgggataaatggtggtgatggttgtgcaacattgcaaatgtactaaacaccactgaatcgtatactttaaaatggttaaaatggttaattttatgttatatgaattttacaacctttttttttaaatcagccttgtctgtctggttcatcactgcactcctagagcctagagcagtacaaggtacacagtaggtctcagaatatattttttattttttagagaaatgagtaaaggggaagagaacccaggtctcccaggtctcagtctcaggttccttttgtttttaatttttatttttaagttctggggtacatgtgcaggatgtacaggtttgttacataggtaaacgtgtgccatggtggtttgatgcacctatcaacccatcacctgggtattaagcccagcatgctttagctatttttcttaatgctcttcctcccccatcccaccccctgacaggccccagtgtgtgttgctcccttccctgtgtccatgcgttctcattgttcagctcccacttgtaagtgagaatatgtggtgtttggttttctgctcctgcattagtttgctaaggataatagcttccagctccatccatgttcctgcaaaggacatgatcttgttcctttttatggctgcatagtatttcatggtgtatatgtagcacattttctttatcaagtctatcattgatgggcattttggttgattccacgtctttgctattgcgaatagcgctgcaatgaacatacgagtccatgtatctttatgatagaattatttatattttggggggtatgtacccagtaatgggattgctgggtcaaatggtatttctggttctagatatttgaggaattgccacactgtcttccacaatggttgaactaatttacactcccaccaacagtgtaaaagcgttcctatttctccacaacctcaatagcatctgttgtttcttgtcagcctgaggttctttccacacatgaagcttcaggaagctctatgctggtggttcccaaactccagcatgcatcagaatcaccaggagggcttatgaaaatccagatggctgggcctcagccccagagtttctgattcagaagtgtcacagacatccgaaccagggtaactccatcttgaataagaattgaagaaagtcagacctgctgggttacaatcccaggaggctatgcactcctagtcacaagatgtttatggctgagggaacagattaatgatgcttactaatggaacaggactcagaacttaaggaaatctcctgatgtcccaatatcttaagaacaaaaagcattcttagtttaagaataggttttgctttagagataatagtaggttcataaatttttgcaaaaatcaatagttacacaagagaataacaatactaacagcctgtcacaagcttgtcatgagcctttgtagtaaagcacataaggccattattttcagctctgttatcctatacaagcaagcactgtatttgaggtaggggcgttccttctcttgcttttggaggacagcctactctgaaatagagcagtctttaataagctatcttcactacactgcactctgcaacttgctgtaaattctttcttgcatgagatccaagaacccactcttggggtctgggtcgagactcctttctggtaacagaagatctgagttgggcctgagagtttgcatgtctaacaggttgtctgggggacacactttgagaacagaagctgtagctactcattaaaccacaagagaagacaagacacatattgacatgacctggatggaggaaaagcagggcccacatgtaattagaaagagaaagagagatttcaaccacctgaaaactgaacctcacaagaaataacttgtcgattttaatcaattgaagaacctctgaagcaggagcttatttgctctccggtgagtttacaggttttgggggagggtaacttggctgtatgacacttgctggatcgtgggagtagagtcatgttctgatttgaaatcagagaactcactgtggcttcctgcctccacgcccatctgtttccctgtatcattgggataacatccaaattccttacaaaggtctgtgaggcccataaacctggcccctgcctgcctcccaggctcattgtagacactgtcccctcactctttagggaaggccacggtgaccttctggaagctcctaggacaaacctgctccttccccacctcagggtctttgcacttgctgctgcctctgcctgcaacaactctctccacctccatcctgtgccactccttctacccccacccttccctgccttgtatccccacctccatctcctttgtcaagctaattccttgacaaatcactgaaggtaccccctcttcctagagcctttcctgacaagcagctctgggtggggtacctgtcaatggccacatacctggtcatcttgactgctccttcctaacattcagcatacaatgtgttcttccgtactggcctctgtttaagtgggagtttcaggagtcgtctccagtacctagtgcagtgcctaacacatagggaataaataagcaaagaacaaacaaaccaagaaaccaggtccagaagccaaaagcaatcaaggccagccagcatctggcatcagagcactgtccatgacagaaagctgccagaggaaggaggagtaagggtttggaacaaagtccaggtggtatagaaaagtgcacctttgcaaagagcttttccttcggactgaaatgcccttcctccccttttccacctggaagacggcttcttacccctcctgctaagtaagcttccagtaatgccttgtcttgagccatccctaaccccctgcctcagggaaagagttatcatcgtaccatgtttgcaattcggtgctggggtggggcggggcaggacatggaaagaactcacctctcaacaaataaatattagtgagtgctacctatgcgcagagcaatgagctaggcatggagatgcagtacactgaaattgtctgtgcctctcagctactgctccagcaaacaacagccacctcccttatccacggggaatgccaggaccccccagtggatgtctgaaaccaagcatagtactgaacccaattgccgaccacatttctgttcacatcttccacccacatgttttagaacttttccatcttaacgaagcatttttcactgtagccattaacttttgcagttcaaggtgcaacagcaaaactagcacaaatttatttttccttcttcacaatttctcagatagaagatttgttcttaccacagatcttggcaatctcagcacacgttttttttttctaaactaagttgaaaaccttcgccttttcacttaaaggtagcacattatggtttctctttggcatatctgaattgccagcatcattactcttgcaatgtgggggcattattaagtaaaagaagggttccttgaacacaagcactgccataatgccacctgacagtcaatctgataattgagccagctactaactgactaagagggcaggtagtacacacagaggagtgattcatgccccaggcaggaagcagcaggatggcgtgagatttcatcacgttactcaggacggtgcgtaatttacaactgatgaattgtttatttctggaattttccattaaatgttttcagactgtggttgaccttgggtaactgaaacctcagaaagagaaaccacagatgggggaactactgcaatgttttttggccagctcacgtgtgccagcctctgagatggacactttctatgggccctgaggaagaagcacagcacagagctaacactgtggcttctgggtcaagtcacttcctaattttgtgacttaatgactttgggtccatcacgaaacgtcaagagcccacatctgtaaaatggggataataattgtacctacctcacaggattattgcgaagattaaatgaatacagtgaaggaattagcatggtggttggtacatttcaagtgctcaatagaatgttagcagttgtcccatttaatactcccagcaacatagagaccaatatgactatcccatataaagataggggagcagtagacttggagaaattaagtgattcacccaatcacagcactcagcagaaggttaaattgcaattagaatctgtcttactcgaaaactaggtttctttccagtccaccatttaccccattcttgtcccctacttatccctctctatagtagccatgcccgtctgtttacttactgtctttggctgctttacaaatacaatagcaaagtagttgtatgacagagatgacatggcccacaagataaaaatacttgctatcaggccctttacagaaaaagtttaccaacccctgatctatagagcagctacctgcttatatatctgtctccaccactagacagtaagttcatttgaactgggatcttatttctctttgaacctctaggaagaataagcacacttttttgcaagggtctcagtgttggttagatgaaatatgaaatgcaattccctctggaaatccttctgcccattttttctgaccccaaacccagaccataggagccaatggtctctgtctgtttcaggaagcacatgtattagtcaataagactgaatgcttctgccagtagctcggaagcctatgagctgccccactggaggtactcttggtaaagttgtttctgctccaccatagaaccttcccaggagggatgtttttggatacgaacaacgtataaaaatcaatattattcctacacataccagaataaccaactagaaaatgtaaatttaagaaaattccagttataattcataaagatccataatatatctaggattagtgctgttttaaaaacatatatatgatctttacaaagaaaattacaaaattttaatgatggacataaaaatggcctaagtaaatggagagatagaccaggttcatagataggaagatgcaatactgtaaagaaagcaaccctttctcaagtagggaggccttttgactctaggtctcccaaacactctccacctcttctcaaaataatagttttttaaaaaatatagagagagacagagacagaccatttgtcttgattaatagaataatgcccaagaattttaaaaacagtaatagctagtttcatggagagcttacccaataaactaattatcacaatggcattttgaactaagaactgtaatcattcccattctacagtaaggaaactcaggcccaaagaggttaatcagcttgcccaaggacacacagctagtcggtggagccagaatttgaatgcaggtagtctggctccaagcctggattatgaattactgctgtccaccactttgaagattcctgtcactcacctgccttctgagaaactttggtggtgggcaaatggggtgtgaagttgcagcaagctcactgtgaattgctgcgcttcagccccgtcatctgtgggcctcaggagagtgtgttctgggtaaacacatgcattttgtgtgtcaaggggaggaggctgagaaccaggctgtatgtgactgatgaagaatcctctctgttcttaaaggaagtttttgcccctgatatgtgagccatacccagggtccttagagcctcaaggaagcccttccttctctacctggatgcaggaacctggctccctgtgggtctgatttatttttaattctgcttccctccttctctcttttgggacgtgctagtctcgttcctgtgcagtctgtcccacatgcacagattcagctcctacttcttgtaaaccactctgagaggcaggtggggaggtggacaagggagccttctgtccacccttgttccatgtaccctgggcaactcctagcactaaatatcagagcccatggaaggtgcctgtgctcagatgacatcccagctaggtaaggagtacagttgagtcttaataagacacatcctcatcccttaaggaactcggtttagaaaactacttcattcaaggcataagaatatcaggtttagggcagaagtgcagagtgtttgtggatggggggagggcgggcatagtagtgaggggcttcccaggttcaaatcccaggtcctctacccaccagctgtatgaacctgaacaaactgcctagggtaggcagaatgatggcttccccaaagatgtccaggtcctaatccctggaacttgcgaaaatgttaccttatatggcaagggggaattagcattgtgggtggaattaaagttgttaatcaactgaccttaagatagagaaattattctgagttatctaaagggcccagtgtaatcataaaggcccttaaaagtggaagatggaggcagaagagaaaggcagagtgatatgatgtgaggctcaactcaccattggtggctttgagatggaaggagtcatgagctaagaaaggcgggtagctggaaaagacaaggaaatagattcaccccaagagcctccagagaggagaagaatgcagccctgctgacacattgatttaacccaggagactccttttgaacttctaacatacagaacataagataattaatgtgttgttttaacccactaagtaattacagtcaaaatagaaaactaatacactgcctaaattctgtaaacttcagtttcctcatttataagttggggatagtacagatgctcctagacttacaaagcagttacatcctaataaacccactggaaattgaaggtgcatttaatacacctaacctaccaaacatcacagcttagcctgtaaatgtgctcagaacccttacattagcctacagttgggcaagatcatctaacacaaagcctattttataataagtgttgaagagctcatgtaatttattgaatgctgtactaaaagtgagaaccagaacggttgtatgggttcttgaagtatggttttggctgagggcatatcactttcacaccactagaactcagggaccatctgtacggagtttgacccaaaatgttggtattgttattgagagattcagtgcctttatccctagatgaacacacctaatatagtttggatctatgtccctacccaaattgcatgttgaaatttaatccccaatgttggaagtggggcctggtgggagctaattagatcatgggggcagtttctcattaatggtgtagtaccatccccttggtactgttctcacaatagtgagtgggttctcacaagatctggttgtttaaaagtgtgtggcatcttcctgcttcttctcttgctcttgctctggccatgtgactgctcccacttcacctttcaccataattgtaagtttcctgaggcctccccagaagccaagcaggtgccatcatcatgcttcctgtacagcctgcagaactgtgagccaattaaacctcttttctgtataaattacccagtcttagatatttctttataggaatgcaataatgaactaatacaccacccaacctcccttgggacaagccctcctctgtagcccagggtgtgtgggcatccctccttacctttttttgaggatgccagattcttctttccccagaaccatttggcccaccttcccttgccctccaaatttctgcttttcttggcctctaattgtccaatctgattccaaggttgtggggcaggtgagggcctccgggatacaggaactacaacccacttttcacaagaaatgttgcctttgctaaaagaccagggtgtaaaactggtattaagcaatggccctagttccagaactggccttaggcaaataatctcatatatatacatgtacgtatataaatatatacataacccttgtgcaaaattgcagggtgtttgtattttcattcattcaaagaacagtaagctttctgatgctggatttgcaaagataaacaaaagagggaaatctctgtttcactacttacagagaaagaaagaggccaggcgcagtggctcacacctgtaatcccagcactttgggaggccaaggcgggtggatcacctgaggtcaggaggttgagaccagcctggtcaacatggtgaaaccccgtctctactaaaaatacaaaagttagctgagcatggtggtgtgcacctgtagtcccagctactctggaggctgaggcaggaaaatcacttgaacctgggaggcggaggttgcagtgagccaagatcatgccactgtactccagactgagtgacagagtgagactccatctcaaaaaaaaaaaagtgggggggagagagagagagaaaggaagagaccactaaaagtaaatttaataccaatgtttattagggcagaaaagaagaggaaaaaaatagaggacaaaacaactcagcaaccccaagtggtatgcttcactactctgaacaaggattccccaaattccttagggcaggcagcctgccccaactcctggtctgggagttccagctccatcaaccccaggtaagattctggttgttcccactcttgcaaactgatgggaagacctttgggaggtgtctatgctttaagctattggttttagtgatctatgcaggttagtaaaatgaagcagtatatatatttgccatttccaaggcaatctttgatatgcccacagttcacgaggtctgaagacatccatttctgcaatttaaaaacaagtgaaagaagcagccttgtcttgcttcgacattatccagcttgttgtctattaaaatgcttgctgaaaaagaacaagaaaataacattaggataatgataatgattgtgatggtagtggtggtggtggtgatgatggtgtggcagtgatggtgatgatggtgattgtggtggtggtaatagtgatgatggttatgatggtggtggtggtgatgataatgatgatagtggtggtggtggtggtggtggtggtgatgatggtgtggcagtgatggtgatgatggtgattgtggtgatggtaatagtgatgatggttatggtggtggtggtgataatggtgatgtggtggtggtggtgatggtgctgatggtggtgatggtgatgatggggttgatggtgatgatggtggcaatggtgacgatgatgatggtggtgatggtgaggtggtggtggtggtggtggtggtggtggtggtggtggtggtggtggtggtggtggtggtggtggtggtggtggtggtggtggtggtggtggtggtggtggtggtggtggtggtggtggtggtggtggtggtgatggtggtggtggtggtggtggtggtgatggtggtgggggtgatggtggtggtgatgatggtgtgggtaatggtgatgatggtggcgatggtggtgatggtgatggtgatagtgatggtgatgatgttggtggtggtgattgtgatgatgatgatgaagaacaagaaggaggaggaggagaggggaaaaggaggagactaaggaagaggacgagtagaccaaggaagaacaaacaccatccagctatcattttctgagcacttcctttgtgtgccagggcaacactaactattttccaggcattgacttttttaatcctagaatcataaggaaggagccattactatcctcattttacaaatgaggaaattattcaattaggcatttttttctaaggttattcagccagtgactggaggactcattatctgaaggctgtctgactcccaattccaagttaacacatttctccagccaccgcttccttgtctttatgtaagtgggagctgcctggagtgaggcctctgaggaaccctgtgtttgcaggagctaggcacccaagctcaccagcagtgcctgtcctaccaagaatcagaggcctcagtcacccttggagggtactactgtggggctgaacccagaaacctctcctttaacttcaactgcacaacagtaataagtgcttttatatttagagtcacttactatgcaccaggctccctagacatcattattaccccaacttacagaggcagaagcaaagagtcagtgaggttaggcaacttgcccaagggcacagagctggaaatcagaaagtcaaactcagctctggccagttccagagcctaagcatccaattactccacagtgctgttttctggaagaagccaagtgagggcttccagtgctaaaagacaaaggcccttggtgcaggggaggccagcaccctgggagttgggagccaagcccagacacaccagaaccctgacctagaatagagctccagcagctggaagaattagaagagggatgtagcccatccctacccctcaaaagcagaacttctattccactgccagcaggtgatcctctcattatctgtgaaagctccctcagagtgatttcatgcccacacacacacaggactgtgcaacacggtccacataaagcatgcagatttacggtggtcagaagcctagcataccaaccactgcttagcctgagttagtagcttaatcatgctcaattagttcctctttaaaatggggttaaagtgcatgccctgcaatgacaccagggtattaagaggatcatgtgaggcaatttatgttacattataaagagtgattaataggagcgtccctgtgtcaattcacagtagcacaaaataaacaacaaaggtataagatttctcttaaccacaaagataaactacctgattatatcttgtcctgcttggtccacaaaacttacagaggagaaatgaaattcactgggcttaccctctgaaggaattttgctaccttatctaacaggatttggaaaggggggaagatgatgaggacagacagggagaagcaaacagcctcatctaggcacagaggtacagagttgggggcatgcagggtgtggggggaaagctgggcagtaccctgctggtgggctgaaaacagaagccccagggaaagggaaagacagagggtgggctgggcagattggcagccttgaaggctgcaggaaggcagtagggaacaggagcgagatctgggaaagaagttgttgatcctgatgacagtggtgatgatcatggtagatgtcacaggttgactccacgaatgctgagcccacctgaagagacccaagtctcaacaaaacacacttctccacatttggggtccagagagagcttttctgcatggcaaatagggtcacgtccctccccattcgggatcactttgtgattcaataaaagttgggctcccccatttgtcccccagtgctcctctcaacctggctccccactatgtctcctgcctcactcttgccacccccattccaaacccataaccagctaaccagctggcccccctgaggcatggtctggaaagtctcccagcccatgccatgctgtcccccaccactccctcagacagaggtccgggagagagaaggagacgtaccgaggctggtcctgatccccttacacaggatgaatcctgttcctgtcacagtggggtttgcagtgagggttcagccagtgctccaggaactgctcctcagcgcgatgctccagggcgagcaggtggtgcatgtattcctgtcaaaacaaaccacactgaagaaggcttcacccacagtgacagccaagggatcaatatgcgtggtgtggctctggctccctagacagggcaggatgggaggacaggcagggagaagaaatcaacggccacacccatgcctctctgtagggaagaccagtcagactgacccacccagtgggcaaaataaagaagtctgacaatactaagtgctgagcgggtggatttccatgaaaacatgggacaacaacttcagaaaacatctgattgcctgcaatctagaaatttcactcctactttataccctagcgcagtggacgtcaaactttatcagatatcagagtcacctgatatctgatattacaacacagattgctgggcctatcttacagtttctgactcagtgggtcttgggtgggacttgagaagttgcatttctaacaagttcctagctaatagttatattgctagttgctctgagaacaaaagaaactcttatatcaggaaaggcatataaaaatgtttatagcagcaataaatttgtcatagcaaaacactggaaacatgccaaatagccacttacaggagaatgaatcaataaattatgttagggttatgccatggactattatacagcagagaacataaattatactgtagctatatacaacaacatagatgggtcttagaaatagcatactgagtgaaaagtccaagtaactacatttatagtgtgacactatttttataaagttcaaatatgtgtaactaaatcatgtaatatattacttatggctatatgcatttctgataaaatcatcttttttaaaagacaagggataagcagaagaaagctagggttgctatgctaatatcaaacaaaaagactttaaaatataaaaatgttactagaaatagagaagcattttgtaaaaatagtctggcagttccttacaatattaaacctagaattaccattcgtactcctggctagcaactgtacttgtaggtatatacccaagagaaacaaaaatggatgtccacacaaaaacttgtatacagatgttcacaccaacatcatttgtcacagccaaaaaccagaagcaacccaaatgtccaccaataaatgagtggataaataaaatatgctacttccatataatggaatattatttggcaattaaaatgaatgaagcagtgatccctgctacaacatggatgaaccttgagaacattatgctaagtgacagaagccacttaggacacttatgtcacaaaggaccacacggtgtatgattctgttcatatgaaaggtggccagccccatacattaatctgtccacaacagaaagcagctccttgccctgaccagtcctgccccttactgtggccagcatctccatctactcaggaacccgctccagaacaccaactgtcattgcctcactcaccctcaaactcaacataagactgagcatcgggacgttgaggctatctccggaatagttctcagatgccctccctcgtctctgccacttccctaggtcaggtcttcaccattgtccaccaaggctgccgcagactcctcacccctctctctgtcccacccctgcgtgttgcattcctcccaccccatgcctcctccctcccccatccctgctccactctgacagagtgacccaaaaggggtcaaaggtggcccaccagggccaccttcctcctcgaagccttcaccagtgctgtctacctgcaaggagtcagcatctgcctctacccacgggttttgtctgtggctctggataatgtacttgcaagccagcagatgagtgcagctttgggtaggattcccctccttcccccactcctcccaacagcagggagtggccctgccctcccaccttggtctacaatggtcattgacagcctttgttaatctctatgcttctcaaaaacgcaatttctccctgaaatggttgcctgaagagactttaatgaagggaacattcatagccatgtgagtagggttaagggaactatcaaagaatattctagcacccagggactagcaatagagggaagtcatgaccatgtctaagtttgcagggccaagggtggagaacccttagaggagccattaggcctggggccaggtgggtggggctgctgtggtcttgggggcacagcacaacctttgcaaggcaaggagggaacagggaacaaacagcccatcctctccctcctcttcccctcaatatcctgcagggcccaatcagaagccagctggccagggaaccaagggattcagtctgcaggagtcagtctccttgagcacagagtggggcacagcagggtggagaacggactggggtcagggcagagaaaaaccgcgtccataccaggatgatgaggagtggcaggtgtgctaccaccagagaagggagcagacagcacaaataacagagggccatgatagggcctctctgcaacctgcagctcatcagcctctgaacacacccatcctttgcatgaaatttttgtctttgcatctcctctctcagttggctcgtgctctgccctttatcaacaggaatgtcacttccagcctttagggctggccttctcctccaaatgcgccttggtcttccccgaagccagttcaggctgtgaattttctgtatatgggttactcatggcattatgtcctataagtgatgcataaaacagaaaaatgataaaacaacaggacctctcttaaataaaagaataaaatgtgatttctcttgtcttagtcagttataagctctcctccttccctctccatcttctagtgcaatctctggcctacaggtactgcctatcatactgaaggtggttcatcatatctctcttcatggcaccacattgctagttaagcaagaagcttcagcgcactcctcttccttgccctcccaccatctaagcagcctaactcctgtgaatgctcctgaatcccttctacccagcccgactgcctctgcccagcttaggccccagccctggggctagacccctgccacaacctctgcaggctcttactaccccttgtcctaccttcttcttcttgtggggttttttttattgttttattttgttttcttaataggcattattgtttacagcagttttaggttcacagcaaaattgagcagaaatatagcattcccatatatcccctgtcttcacacaggcacagcctcccccactaccaacatcccccaccagcatgggatattttttacagttgatgcacctgcattgacacagcaccatcaccagtccatagttgatattagggctcactcttggtattacacaaatgcatggcagtcgggcatcatggctcacatctgtaatcccagcaatttgggaggctgaggtgggcagatcactcaagctctggagttcgagaccagcctgggcgacgtggtgaaactctgtctctaccaaaaatacaaaaaaaaaaatagctagatgtggtggtgcatgcctgtagtcccagctactcaggaagctgaggtgagaggatctcttgagcccaggaggtagaggttgcagtgagctgagatcgcaccatggcactccagccctcggagacagtacgagcctttgtctcaaaaaagataaataaacacaaataaaaataaaagcatggcaccaacatctccttctgatgagggcctcaggaagtttccactcatggcagaaggtgaaggggagctgatatacacagatcacatggtgagacaggaggcaagaaagagagaaggtgccaggctctttgcagaaatccgttctcatgggaactaagagtgaaaactccctcattaccgctattcatgagggatccacctccatgacccaaacacctcccataaggccacacctccaacactggggatcaaatttcaacatgagacttgatggggccgaacaaaccacacacaaaccctagcactaccattgcaatatcacacggaacagtttcactgccctaaaaatctgctttgctctgcctgctcatctgcctaacccctggcaaccactgatctttatactgtctctatagttttgcctttcccagaatgtcatacagttagaatcacagaacatgtaattgaattttcagattggtttcttttctttagtaatatgcatttaagtttaactccatgtctttccgtggcttgatagctcattttgttttagggttgaataatattccattgtctgcatgtatcatagtttatttattcattcacctggacatcttggttgcttccaaattggagtaattatgaataaaattgctataaacatctgggggcaggttttgtgtggatgtaagttttcaactcctttgggtaaacaccagggagtgtgattattgaatcgtatgttaagagtacgtctggttttgtaagaaactgccaaactgtcttccaaagtagctgcaccattttgcatttccaccagcaatgagtgagagttctgttgcttcacatcctcaccagcatttggtgttgtccatgttccagattttggccattctaataggtgtatagtggcatctcgttgttttaagttgcatttccctaatgatgtacgatgtttcacatgcttacttgccatctgtatatcttcttcagtagatgtctattcaagtcttttgtcagaatgggtttttaaaatataaagaacaaaaatagctttactggtttttatttttatcacaacagtgatacatattactttcttaaagtcatgaaaaaaaaaaagaaagttataaagaagaggttgaaaaatccctcttgatttttctgtatcctgttgcaaactaatttttttttttttttttttttttttgagacggagtctcgctctgtcgcccaggctggagtgcagtggcgccatcgcggctcactgcaagctccgcttcccgggttcacgccattctcctgccttagcctcccgagtagctggaactacaggcacccaccatcacacccggctaattttttgaatttttagtagagacggggtttcaccgtgttagccaggatggtctcaatctcctgacctcgtgatccacccgcctcagcctcccaaagtgctgggattacaggcgtgagccactgcgcccggcagcaaagtgatatatttttttaatttacccacgttgcttcttcacttaaaatgtctgtatgcctcccactggtctcaggagaaagttctgattccttaatatggctaaggtctttccatgacccagctacacccatctcctgagcctcttctctcaccatcaatacacttgagctttgttctccatctttccctgaacgggccatgcttgctgttctttctaaggcttccaaagcacctgttgtttgctctgcctagaacacccctgtaccttcttattttcccatctcactcttacctgacttttcaggcctcagcttagatgttacttcctctaggaagccttctcagattccctgtgaccccacttctctgggtctccaaagctccatagacttttcccagcatagccctccctggtcattctgtgtggcagtgagctctccctgagagtggggacttcattggcctgcctcatactgtttagtggaggtcgtaggtgggttcgctcatatattggtatcaaaattggatgttccagctgggtgtggtggtgcacacttgtagtccttgctactcaggaggctaaggcgagagaattacttaagcccaggagtttgaggcttcagtgagctatgatcgtgccaccgcactccagcgcaggcaacagggtgaggctcaaacaaaactcaaaacaaaaaacttgttcttttatgttccctccaaagagaatggatagagatgggaatgatttttaacttggagtgtgttttttatattgccctgaaggaaatgttggtgctgtaattataggatgtgaaccattacaaagtatgcatagaacaggtccatacaaacagcaggccaataatcagagaagtggcatttcaccttaggaaagagtagacatactcagtcatatttgtgatgtgattaaattgtttttggcatgtatcaatatcataaaaactctaaatcatggaaaccttcctatggcattaagaaggctttaacaaagggtcgggtccactatagaactctaagtttttaagtttttagaacaccctctaggaactctgcattctacatcaaatgtactcatttaaaaagaaaaagaatgtgcaaaggaaggaattatgaagtgtccaatttttctgattttttttttctttcccccaagacccatgcagtttggatttgttttggttatggttgttgttttcatttaactcatcaaaatacactcagtgttctggcagggagtctctgggtcagctggggtagagggcagatggtgagagggctccttgtgggatccaacagtgattccctggctgctttctgaacatgtttgcggatttggggctgagttccttccctatccagggagtctttggccagaagaatagtaattgggaggaacaggaaggccgtgtgcagtcttgtaaataaggaacaacaagttcccagcatataactttacttgttcaactattctgtggaagcagcacactgaaggaacccctgctgcctgcttcttgctggcctgtttgccagacagggaggaatagaagctaagagtctgagtctccttcaaacctggaccctgtcattattgctttacctctccagcctcagtttgttcatctgcaagatggggattgcactagcacttgcttccttaagttagttaacttgcttccttgggttagatactaaatgaaatggtgcaaataaagttttgtgccaaataagtagcctgcatttgtccctccagatcctgtctgtctcccttttcgcctggccgtgggacccagattaattgtcgccgtagactcccttggcctgtggcttctggttgagtttcatcagtgggagacaccagaacggattagaaggtaggaggagggagaggccagggtattcaatcccctagttcctcaccaaggagtcacagccacaccaagcataaatacaatctcaaaagaaatcatttcagcttgaatgtcatctttttaaagaatttccacagttcacctcagcaattggctgcatccctctcctgaaggccacagctcctaggaggctgtcctctccagctccgggaaccgtctgcctcccttacccctttatggtctagaggttgttaaccctgatcttttattatttcttgttggtttgccttaatcctgcccacgcctttgtaaaaagtctctttattaaacactcttcaggtacccagtctcctgctgggatcccaatactacagggccttggcacatgattcttggcacatagtaagaatgcattaaatgctagctgttaactttggctactattagataacaaagatctgagtacacatcaagattgtgaaggagagcatctttcccaggaactggtacacaggaaactttccgtaaaggcttgttgaagaaaagactacagcatcattcttcaaagcgtgagctgtgctcccctcagaggcccataaggccaaactatttttagaataatactcagacattatttgtcttcctgctgtattggcattttcactgatgtgccaaggcagtggcaggtaaaatgactggcgccttagcaggaatccaggcagtggtacccaattctattagcggtcatcgtatccttccccaccacgcacttacagtacgaaaataaaaataaaacattcttaaaatgccagttgccctgaagaatgccctggtgaaacagtatagagtgacccaaaagggcatatgcaggcagtacttctgctgtatgacaaagtgcaatggggtttcacaaggaaaagcatgtgtgcaattgctggtgttgaactggctatgcatgttttatgtgcatgttgggcagacatcttgacaatgaatgaagtgagcctgtcacctcaagaaaaacaatttacagtatttattaaatagaacttcccagaggaaaccagattttggaaaacttacatctgctacagaaggctggcaacttcccaatacttaaagacttttataatgagatcactggtgatattaacgaatgtcactactgatacacagtaccttttataattatatactcatttgcatctttactcatttaatctctgtccctctcagccaaatatccacccagtttttttatggcagtgaccaaagtatatctggtctgtgatttagtgcttggcacacagtaggaccacaacaaagctcactggaaaaatgtataaaggagcaaatgaataaatgaaataactgttctttccctataatcttgctaaatcctccttggaaattttcttgatatctgtgtcagtctgctcattataacagcctaggccaaatgtacattaaaagcaccaaaaagtaatatatatttcacactcctaaacaccaactgaaataatcattgaagaaaaacaaccaaaacagacacacactgagaataagaaagaaatgagcactggtttccatgacatttcactatttatttaaaatattaggaaaacgaatatgccacaaaggcttaaaaagcaatcattagtcaaatcaaaaggcaaattgcaaatctgctgaaaaccacaaattcaacaattgcactggctgagttagaaatggcccaacattaaggataatctcaaatgttcctggaccaaggaagaaggggtatatggaaaatgagttttaatttcttcagattcctttctccaagtgggggggtgtaaatcaaagcaaaacaaaaaccagtatctgtgttccatgtcaaatgccaactataatgatttaagtaaattatttctcagtaattagagcagaaattaaaagtagtcctttattatggctctggagtggtgtgataatgaacttaaatacccaccagaacttgacctatgctgagaatcataaagtggacagttattctatcaaggcaggacctttttccaagaaggcaaaatacttcctgtgacatttttgcagaattaaagatccatcagcatttggaaaaattattttgctcattagtacaagcaaggtaatcctatatatagaatggtggctcagaacttaactgcactggaatactgaaggctccgtcctaaagaaaggcagaacagtgctgtgggcaatttacacctcggtcactccaaactggcctttgaggtaatggggaacaaaagggtaatggagttactacatacatttgtcaaagagctaaacatgaaagcatattttacaaagactacttacaataaagctaaaatgatttatatttgcccaacaagaacactccttaaaggatcacaggccaaaatggaacacttccaagaaaagtgtattcccaggtttcacaagcacttacaaatataatcacaaaagaaataatttaagcttgaagacattcaagctttattcaagcttcaagacattcatctttttaaagaatttccacagctcacccgagcaattggcaaacaacctctttcctaaaatttgagtagattaagagaaatttaatgagtctaagtgaggcgatagaaaatatttatttggaataacctccaggttttacagcagagctatatcccacaaaatttctaccctggagagaagcaaaggaaggaatggaaagaagtaacaatcatttagtaaatgccaatactgtacggtgcttggtggtggggacccagaagtaaaacaactagtccatctcctcaagtaatttagaacagtctagtagacagacataaaagagtcaaaaatagcaaccttgcgctgcaattgctatgctagcgggacgttctgatttactagggggaggcaccagaaaggcctctcaaaaacgacatcatttaaggtgagtttttggggatgaataagagttaaccaggtaaacaagagcagaagatacaactacaaaagcaggtgccatgggaggagaacttgcaacacaccatcatcccacatacattgtttctactcatggatttccactgccaatgaatggcactaagttgcctatacaaaaccctacacgtcattttttatccctattcctccctccctgcacccactcctcctgccccagcaacagcccactggtctccaattcaagataccataatcatgttcccatgatatctctaccttaaaacctctactacaatactctctcagaagacagtgacattgaatattaaaaataacatgaattgtttaaagtcttttggaaagcaattcaataatgtatactaaaagctttaaaaatattctgattcttggacctagtaattcattttctcggaatatacccatagaaaataacttaaaatattaaaagtactttatgcacaaaaatgttctgagtgttgtttataatagaaagatattggaaatgatccaactatctaacaaaagaggataattcatggttacaaatagattataataatatgaggacatgtgtatgttaatattaagggaaaaaacaggatagaaaattgtagatactttttttaaatatatacaaagactaaaaagaaatacattttttaaatgcctgtctttggggagaagggacaggactacagttgattttcctttttttttttttttttttttgagacagagtctcgctctgtcgtccaggctggagtgcagtggtgtgatcttggctcactgcaagctccgcctcccaggttcacgccattcccctgcctcagcctcccgagtagctgggactacaggtacccaccaccacacctggctaattttttgtatttttaatagagacggggtttcactatgttagccaggatggtctcgatctcctgacctcatgatccggccgcctcagcctcccaaagtgctgggattgcaggcgtgagccaccgcacccggcctacagttgattttcttttattcttttgactctttcttggtttccaatttttcaatagtacgtgtgaaaggtttaaatatttttaattatacaagtaattactctagtatacaattcaaacatcaaatcaccacctttaatcctagtctcctaaatgagatgatacagttaaacgtcaactgattacctctctagatcttcttttagaaatttacatgcatatccatgtacctatataaatactgcatatagtattgttttgggtgtgagtcctaggaaggcagaattttactgttacccaggttggagtgcagcaatcatagctcacttcagccttgaactcctgggctcaatcgatctcccacctcagcctctcctgagtagctggaactacaggtgcatgccaccccacctgaccaggactgtgaattttattcagagtaagacaggaagtcattggcaggttttgagcaggagagggtcaggatcttgtttacactttaagaaatgactctgactgctccattgacagcaagacaggaagtagggagaccattaagagattattgcttagtccactctacagataattgtggtggaggtggcagtggagggcgagaagtagtcaggttctggatttggaggttgtccccttagcccaatgtggaacgctaaggcagcagccattatgagggtaaaacagtgtattttgtttggggctgttagatctgaaatgcttgttaaatattccagtacaaacagtggtgtggagtagacagtcatgtaaatgaccaggaagaggtcaggctggagatagaagtgtgtgccgtcagcagggaggtgagctttaaagccacatggagggcagagccctgggacctcctgacatttaaacagctgtcagaggccaagaatccagtaaaggaaacctagcagcgggagccaccaagtggaatgagaagcctgggcgaggcatgctgggaaagtggaaaccaagtgagcagagtgcccagaaggaaggaagagagatcaattgtgtcaaaacaaaactaacgtgtactggttcccagtcctaggatgccaggagcagagatggaccacctttgcagttctccaagacagcacttcttgacttgaaggtgaacagggatcacctgggggttagggaggcacagatttgcctttgggaagtatggagaggagcctgggtctgcatgtctgacgggatcccaggtaaggcccgtgcagcccagctggggatcatattttgaacagcaagagtttagaccacaatcctgaaaatcaacataagcacattcatcactaaggaaaccttcaaggaaagctcagaatatttttccaccttcttccctctaaacacaaacctagcccttcttttcgcacagcctgatcttcattaatttctccccaaacagaggttttttctctgtcaggatcttgagccttcattataccatgagctctctaacatgatggggccactttgtctaaagtagaaagtcaagaggatcgcttgagcccaggaggcccagactccagtgagccatgatcgcaccactgcactccagcctgggcaacacagtgagaccctgtctcaaaaataaataaataataaataaataaataaataaataaataaataaataaatagtagaaagtcaattcagctgaaacctacatgcctccaaaagggatgtctccaagcaaattagttccagccttcggagagggttcatcccattcctatgaagtctagaatcctactctccaaaatctctgaaaatgtggggtcaagtttattctgaatattctcataaccaatttctctacccctgccacttccacattctagccattcccttgctctcttgtcagcccccaccaccccatacaacacatccctgccatccaccattccctcaaggaactactaacacaaagtttctgtatgtagcggacttgtcctaaggtttgggggtagcagtgggtaataacagcacagagcagaaagcaaatttaaactcagtgtccagagttaccataaaataaatgtatccgttattcctgctgctgggaatttcagtgggttgccctccttgggttctaccttcccacctttctcttcatacgctacctccatatgctgcctccatacactcaaaatccctccttctctcttacccagagccatctgtctccctctgatctccctctccatcccctctgggccttgccttccttcatctaggttccccgcaagatgtccgtgctcctctgggttgaatactggccctccctacagtacagggttacccagcaatcttctcaaaagcactttgtccttcccaccaccaagtcagaaaagaacagcttgttgcagtgaatcagcaggatctatgtcaaacagtctagccctttgtgtgcacgggcacagcttgtctcaacctgttttcaaaaagcctataaatccacagaagccaacctctgccaatatttaagccaagtgttaagtgtataaacatggctcagtagatcttcatgaggagagacttctgcaaatcttcatacttgttttcattttgaattcttaacacctcccctaaagcaccatttgtttaccctcatcaatggcctcttccctctctggaagtgttttcttttgcacagtcccttaacatggagaagcaaaataaaataacctgaccagtcatctctcggtgatttagtgtggaggggtgagtgtgagggtatgtggctctgttctcaagggcacatgcattctccaatgatcactaactctactcatttgcccaagtccacttgtttgtctcctgggtaccatggcaagaaggtgcaatagcgcatccaaaacgtcacttcctatttcccaggtatgacagcatctaaaggcaagcatttaagaggctgtgtcctgaacctctaaagggcccctggaaacaagatctaatcacatcattcccctgcttgaaatccctgcacagctccctactgtgtacagaaacccaactctgctgtggcatccaagtaccttccaacccagcctcacaacaacctggcgatgccatctgccatcattccacaaaacccaggtccgcaagtcaaggcgaaagtagaagagggggctggaactcagaccttctgaaaaaatactcagtaaggccttttcaaaacacacacacacacgaaccctcacacacccctcacacatacaccctcacgtacacccctcacacacaccctcacacatacacagcctcacacacacccctcacacacacccctcacacacaaccctcacgcgcacacacacccacacacacaccctcacacacagacccctcacagactgctcacacacagaccctcacacacacctattacacacattcacacactcctcacacatacaccctcacacccctctacacacatacaccctcacacacacccctctacacacacacctcatacacagacccctcacacaccccttacacatacaccctcacacactcacacaccccttacacatacaccctcacacacacctgcaccttcacacacctctcacacacaccccttacacacacccttacacacaccctcacacacccctcacacatactcctcacacatactcctcactcacctcacacacaatccttgcacagacccttcacacacacaccccagacatccctcatacaccctcacacatgcatccctcacacacacccctcacacacccctcacacttctgacacacaccctcacacacccctcacacttctgacacacaccctcacactccttgcacagacccctcacgcacacccctcacacccccacctcacacacactccttgaacacacccttcacacacacactctcacacacaccatcacacccctcacatacatcctcacacacatgcatcgctctcccacactcctcatgcaccctcacacaccttcacatactcctcacacacatacccctcatacaattctcacattcgaatacacacaccctcacacacacacccctcacacatccctcacacacacaaacccctcacatgcacaaacccctcacacacacccctcacacacaccctcatacataccctcatacacacacccctcacacacattcacacacacatacacacatacacaatactggcagccaaattcacagcatggtgcatccatcccaccctcttcccaagcaaagggacatctgtgcgcagctgttcttggcctacactcagaaacagggagggtgaggaggtcttggcaaaaggcaaagagccagaagggctggctcccaggaggcaaaggccttagcctctgaactccctccttcccaggctatgaagatgtgggcccgtatggcagctctaatgccagcctctggcctcccctggccagaggtccaggcttatcggctcctcaccacccaaggacaaacctgaggccactgcctcttatgctccaactgggagtgcagggccaggatcattttgacagtcacagttaaatgcagtaaattacctctttttacatgccactgactggcattattaattttgctttcagtaaatccataaaagaagaagtcaacaaggagacccaagaggcgtgagtgggtcaaatggtaagtcgaggatgtggagtactcccagccgcagggccagcatgaggtgaggaggcctgtggtttctagggatacccctccaggggcctcagaataaactgcctgactcctcgcttgggttggtatcctgctgcctctggctcttctgtcacattgcagactggcaccaggaaacctgtgtcagccccaaggttctatccagagccctacaatatgagacctggaattagacattctggaatctaggccagattccagccaaactctgcattttatagatgaaaaaactaggcttccaaaagaggaagtgacttacccaaagtccacaactagttagcggcagaatatggactggaaatgcactgggtggaatattcttcctgcctcatccctaccccctgccctgcctgagaactcctggtcatccttcaagccacagctgggtgggcacctcctctgggaagccttcccagcctcccctttccttccagttggagctcgagactctcttcttgcagagccgcagtccattgtaccagataacctcgttagtgagcccaaatcaggctggggctcgagactctcttcttgcagagccgcagtccattgtaccagataacctcgttagtgagcccaaatcaggctggggcactctggctccacctccacacaatgggcaccttgagtaaggaagaatgtctggtttatctttcatcctcagtccctggtgcttagtagggcatggtcaatataaaatctaattaagtgcacatcttgatcagcacgcaccacttgaccctctcactctctctttttgtctaaacaactaagatactctccataccacccagttcaacatttaacagctttctaaatgcttttatgttcccaactagaccacaggagctggtacacacgtggctgatttctcccagatggcctagcccagtggttctcagcctcggctgcaggttggcatcactggggctttggccccatcccccatacccaggtcccaccccaggccacccctctgggagtgggacccaggcatcggaatttaaattccccaggtggttccagaatgtaaccaaagttaagaaacacatttctagaaaaaatacgataccagaaactatttgttaattcaaccaattctgtgtgtgttcaagtgagtgcaattatagagagagacagagagagacacacacagcgtgacagagagtaaacaagaaaaagtttacttggcaatgtgtagacttggttcctctcctttggcactactgacattttgggccagagggtggtggaggctgccctgtgccctgtgtagggtgtttagcagcatccctggtctgtacccactgggtgccaaaagcaatgccccacacaggtgtaaccaccaaaaatgtcttcagatattgtcaaatgtccctggggatgagggggcataatcacctatggatgagaactactggtgtagactagccacccaataattgactgcatgtttgtttcacatttcaattgtaaaacatatgaccacttttccaaactggactgaatgcctgaggattctggacattggatgaagtgtctctgagagggacatggaggatgggatggtggctcagcaataggttctgaggcaagaaggagttacatggaaactaatcaggtaggttcgaggcagttaagaggagcaggtggtggtcaagcctataaaagatgagcaaaacaaaccagaaaaagccagatattcagtaaaattgcaaagttggaagcaagcagagggctgtcaaggattaagggaggtgatgaccacaagtgggaaaaagcaaacagaggagaagctttcagaagtttttgagcaggggaaggaccacacaaaacagggttttagggccagagtctagcctggcaacaacagttgcaacaacgggctgcagcaattcaaacccacctgttcacccacatctacaatgcctcagttaggacaaagactgttattccacagacagagttcaaaagagccaggtgcagatgctggcacagaaaatgtcagggggcagatgtgggagtcattagagctgcctctcgagcaccttgagcaggagccactgctttgaggactcttcaaccagctcccccagcccctgccgggtccctgaggaagagctgcagaatggccgctccaggcatcatgccaaaagcacagggggccagccagagcccccacccccaacccgccagccgccaacaggatccctccctccaggcatcctcctccccatcacagttgtgcacatgctgcccttccttcaccccagcccctcctatgcctccccgccttgctctgccacccccactctcttggcttctctatctctctgcattccttctcagccctttcagggttcctcttcccctgcccacctctgagtgttggtgatcccagacttcaatcatgggccccttctctcattgtctcaaactctctaacacccagatctgtactccccaacttgaaaaatccttcagttgttctctactagatacaagataaaacccaagatacctcttattctacaaaaaaaaaaaaattaaaagccacatctatccctaagagcctgaagtcatctgttcttaaatcatactgcatagcagccatttgcttacttctgtctccaccacagactttgagcagaaacctacagccccggcacctagcaggtaccaggtacttaatactcagaggagtacttaccatttgctgagcactttctaagtgctttcttaaaaagtactttgttttatcatcataaaataattattttacattattatttataataataatattatagtaatatcagcaatagtatttattatccccattttatagatgaaagtactgagctgcagaaatgtgaagaaacttccccaaacttacccagttagtaaacagggagattcaaacccagtctgaccccaaagtcagcactcttcgtcactgtgcaatactatatcttaataagagcctttaaatgaaataatctaattatgcacgagattttgcagtgaatgaaggtaaatgctactgcagctccttctgagcctcaacatggagattcagggaaaacaggataagcatcgtgcccagatgaaggggccaggatgggagaccagcctgacagacaggcttcccagacattctaactttgctgggtcactgctacttcccttcactgggtggggctaaaatgccaccaaagtcagtatcattttagcaacaggaggaaccaagccaggcctgaattgggtccggggccagcatagcagggtctagtaacatctactcacagagggagcctggttcagaaagactagacaggtggatatcatgaccccacagggcagaagtaaggccagagaccaaaatcagagggatgagatcagagcagaacccctcaggcagctggggcagagattctccctgcctggacagaccatcattgaccaaggatgctggtccagcctgctccggggcccaagggaagaggcaggagatggggttagcgttggctaaagggaacagctccccagcaagcaggacaggggtgacattcagcagccctctccagattctagaactcccaccattggcctcattattttctattttaagttaccctgttcataacaggtgagtcgggctggcacctccaaaggagaaaatgcataggtaaaagattgagattgcagctatcttctacctgaaactctaaccaaacccctaactagcagcccatgctgggaccaacacctagtttcatagtgaatggcattcaaatgatcacattttctttaaaactgccagagcaaagcactcacccgcattggctcatcggggaatccgggtttgcttggtctatcctgtcgccgagatcttaggagctgtttggcctgcttctctgtcaaaatcggggaggtctctggaaaagtcgggaaggtgccttaaggacactcaggctcaggagttcatgagccatctcaacagtccaaggcaaaagatttgcaagttcaattttggttaaaacatgaaagttctttcccggggacctgtcccaaaggatgcagcattccagagggctcaggaaggaattttgaattgtttctaacatgattactcagagcaaaagctgcacaacctaaacatatttactgattgcaatggtccatctctttgaaagtgggtattaatttaatgaatcttcagttcactggtctgtgtgtcttaggtttgctttcatggaagttttttttaatcctcactacactaaatcaagtttaaagtcattactggaagatgcccagtgataataagattatgttaaacttgatcatcacaacccctcaaagaagatagtataaaagtgctttgataattacttgcaaattctaaaagatattatcatcataaaaatatatcaaattttggtgatctcatataaactctaaaataagctattagaagctgaagatttatcagcatttttgagaattagtgctcaaatacatttaaagatttttaaaaaatatataacatctttaatgataaaaattctggaagcctactcttatggaaaaataagaaaagaaagagcattgaaatatctatatacactatatattatttaaaattaaaaaattaaatatcaaatagactattatttatcatgtcagcatagaaataggctgtttttggagtcagtgcccacctgagaagacagtcagtaaggtaagagacagcacgagcacaggcaatgtcttcatcctgccttggttcctctgcctcttgctgagtgaatcctcccagactgagtcagccaacttgaaggaagccatgccaggccctgcgcttgtttatgctttgactaacgggacttacggtatgatgctgaatgtatctgactctgagcgttttagtaatgaccactgaaatattttcctccgaattcctgtaaattttcatcctgaggaaggaaattgttcctctgtaatatgactttcagagcttgaatctgaaaaagcaacatgtgatattcacttcatttaaacagacagataagcaccagacagatgtttgtgagtgtttctctggagcttccatttatgctcctgtttcattgagaattcatgatctattacacatttgtatcttttaggacatttttctaaagcccattcaccagtctaatttgatcttcccaataatctcagaggtaggcagggaaattagcaaggggcatgatgagtggggaaaaacaattttcagctgactttagagacagaaaaacagagttcaaatcctagcttcaattttttctagcaatgtagccttaggtaagtgacttaccctttctgaacttcagtttcctcccctgtcaaaaggagataagagcacctaccttgtggggtgcaataaaggatgaggggaaagctatgaccttcatggcagctagtactattcatcgtccacttccatcttacagtaagaaaagtgagattcaaagatgtgaaatcaagttcaagttcacacattatggatgccaaggtagagcctacgtcttctgtcttcaaacctagatcatgtgctcttcccagtaagccccataacctcagggacaactcctcatcttttacagggcctcacgcaacatgctgtcataagactggaaccagccatgctccagattcaagggtatttttataaggacaacaaaagtttaagaagctgaagtcatttcaaattcaaatcatctataaatatcacatgaagaaagtttcttgttttgttttggtttggtttggcttggtttggtttggtttggttttgagatgggggtctcactctgggtctcacttcaggctggtgtgcagaggctcactgcagcctctaactcccagactcaagcgatccttccacctcagcctcccgagtagctgggactacaggcacgcaccacaacactcaattaacttttttatttttttattttgtagagacagggtctcactattttgaccaggttggtttcaaactcctgggctcaagtgatcctcctgcctcagcctcccaaagtgctgggattacaggcatgagacactgctctcagcctaagaaattcaatacatgattaaaatatgtctggaaagcatgtgacatttatttggataaaattctgtattcagagagatgatctgatgtttctgtggtcactttgccagctcaaaagaaaacaataccctatgtgtatttctccaaatttatgctaatgtgtaactgatattaaacctgaatgtgctgcccacacagtcaacataaagatattttgagcagattgtaaacaagaaaaaaaagatcatgcaatgttagcaaagttgtctcacatgttcatttgctcaaatatatatatatataagtaaattttttttttgagacagggtctcattctgttgcccaggcagaagtgcagtggtgcaatcacagcccactacagcctcaacctcctgagctcatgatctcccatctcagcctcctgagtatctgggactacaagtgtgcatctccatgcccagctgattttttttcttccttgcagagataggggctcactatgttagccaggctggtctcaaactcgcaggctcaagtgatcctcctgcttcagcctcccaaagtgctggaattacaggcaagaaagaattactgcacctggcccatttgctcaaaattcaatatttgatttcatgcactctgctgctattaacatccttctgttttcacataattttcaataactaaggaattttagagcatttttttttttgaaacatggtctccctctgtcacctaggctggagtgcacgaacttggctcagtacagcctcaacctcccaggcttaagtgatcttcctacctcagcctcactagtagctgggactacacgcatgtgccaccatgcccagctaatttttgtatatttttgtagaaatgggttttgccatattgcccaggctggtctcaaactcttgagctcaagcaattctcctaccttggcctccaaaaatgcttgaattacagatgtgagccaacacgtgcagctagtagcattatttaaaaaaaaaaaaaagaaaaaagaaaaattgtcacgttaaacagcttgagttttgtatgtgtatattcaaatttttcactccttttactctttgtggttggatagaacactattttgttttatcatatcaaataaatatcttctgtgggccagaaacaaaatctatacttagctataaatttctaatgtgtccaatgtaaatttacaatagaagtattttttggccagacatagtagctcacacctataatcttaacactttgggattccaaggtcagaggatcacttgagcccgggagttcaagcctgcagtgagcaatgattatgccactacactcaagtctggacaacagaacaagaccctgtctccaaaaaaaaatatttttttaaattttgcaacttttgtctatatcagcactgtccgataaaaacataaagccacagatgcaaacaacatatgtaatttaaattttttcagtagccactttttttaagtaaaaaggttaaatattttaatattatattttaacatgatgaaatatccaaaatattattattttaacacataatcaatataaacaagttgtcaatgagagattttatgcctttttttgtactaaaccttcaagatctggtgtagattttacacttatacatttcaagtgctcggtagccacatgtggctagtgctaccatattagacaacatggatctagatccttccgtctctaatgccaccacccaagtctaggccattgtttccctcacccagcttctggcaccaggctcccaaatgggattctagtttccctccctgttcacttcaatctgttctccaggtagcagcaaggatgaaatagaaagtatcagttagacctcatcacttccatgcataagatctttcctcatcttcccatgagagtcagaataaaattaaaatccctaccaagcacaacaggaccctgtgttttttgtgcctactgccctttccaaccttactccaaccactcccctcctgctcactgccatctggccacactcactcactttcagcttaacaagcccactcccgcctcaggacctttgcatgtgctttttctccctcttttaatgactggatctatctcatccttcaggtttcaatttgaaatttctcctactcaggaaagcctgcccttaccagccttcttaataaaaagttccctgcccccaccaccaccactctccatctcacagcactcaccataatttatacgtattgcatttatttactttttaaaaatctgtctccttcactggtaagctttaagcaagcttgtattatttttataattttttaaagcataaggcaacctctggtggactgaggtggtgagactggagagagtcggagcctgtatcacaccctgggaggctgctgcaagtctcgggtggggagggccgttcaggtgtgatactggcagggccatcaaatgcccttcagcttggcctctggatgttgtcctaaaagaagcgagagggggaggaatatagaaagaccgaaagagcaaagtgtcttattgtgagtgtcactcaggcggtgagaattctcttctaaaccccatcccggttctcaggaaaagccccagcggggtaacgaggtgagtcggcaaggctcccagtagaagacgcaattcccaataaatccacaaggtggcagagcagaaggtggaaccagggacaactaagatcaggggaaagagctcaaggccactaaggttaattattcaagaagttgccagcgattccagagaatctactggaggtggagagagagggtgctgctgcacctaaaactatttccgtacttttattttaattgatgtactattgaaggcattcatcagatgttgtggcctaggaaagcggtacagtaagtcctcataacattattgctgataaattcttggaaactgagactttaagccaaatggtccagaatgaaccaattttaccataagctaattgatatacacaagaggtgagttcctatggcatatttctggtcacaaaacatcaccaaacttctaaataaggacccaaaacatttctaatatcaaacgttgaaggctatacatgtatttaagaaagattaataaaaacaagtaagatagttattaatatttacccacttattctagttcagggccgtggtggctggagcgtgtcccagcagctcagggcaccaggcagaaaccagccctggagaagacaccattccatcgcagggcacactctcacacacccacccacacacactcacgcggggacaattcagacacaccaatgaacataacgtgcacagctttaggatgtgggaagaaaccgaagtacccagagaaaacccacgcagacatggaaagaacatgcaaactccacacagacagtggcccggggctggaatcaattttttttctcatcaacattgtaatgaaacaacgttgaaggaaacaatgttatttgaggacctgttgtgttaactatttgataacatttaaaagcctataaaggaataatgctaccacccatattcacaacacccaaacacaactttttgtttgggtgagtttcccttttttttttttttttttttttggaaggaactgtcccattacacagatatttaagtgtcattgacaaatgacaaacccaacattctagagttctaaatgtcatcacactgaactatagaaactttagagacaagagaacttcgttttgtttttgttttttgagagagggtcttgctctgtcgcccaggctggagtgcagtggcacaagcatagctcactgcagcctcaccctcctgggttccaatgatcctcctgcctcagcttctcaaatagctggaaccacaggcgtgcactaccatgcccagctaattatttttatttatttatttatttattttagaaacagggtcttgctatgttgtccaggctgctcttaaactcctgggctcaagtaatcctacccccttggcctcccaaaggaacatttttttaagtatagaaaaatgccaaatctgtccccatcaagagaattataatgtgtcgacattttttaggcccagggtaaattaaataaattctaacagtcctctccatatttgctttcatcttttttactgtctacctcacatgtacattgtaaagaattatatatacattgtaaaaatatggaatttatagtatagttggtagactagactacagtattttttaaaataatgatagtaactttaaagcaatgatagtaactccataagctgtgtgtggtgcttatgggtctagatccttccatctctattgtcaccacccacatctaggccactgttatctctcacccagcaccaggctcccagctggcatctcagcttccctccctgttccttcaatctattctctatgcagcagcaatgatgatcttcatgaaatagacataggaaatatgttagacctcgtcactttgcttccctgtaaacatttatttacaggcatactgtgcagacatatgttaggtctgggcaggtgtggtaggttgaattattagcatcaattcttcactaccaccccaaatttatgctctctgccacatgactttgcagccccatgtcttgactttggactcaaccagatgacttgttttgggcagtgggatggtggcagacatgacactaacaagggtgtgaaatggtttgtgcagttaagtgtgccctctgacatgtctgtcattgctacaaaaagaccttccccccgttggctactgccccttcaagctgagtctcagaattagcttacatgcaaagtagctaagaaaggagccaagtttatgcagatctgtagcttaaaagagacccactcaacccagcccggtctatttcagctgacttccagctaccacagcctgaagcagagccacatcacctgcagatccctcagaataaatgacagttattttaagccactaagactaggagtggtttgtttcatagcattactctgacaatagctaactgatacagaggattctaatgggatggttagtgtgtccaaatctgggtgctattgcatctaagttaataataggctcctgccagaacattcattcaaaagtgactgagtttctactgtgtaggcagtgtggtataatggttatgactgtgggcagcagagtcatcaacagacctggccttgaatgctgattctcaaacttattgcctgtgttacgttggagctgagtgacattggggaaatttcttaactttccaaatcactgttttctcacttataaaaaaaaagaattataataaaattcacctcataaggttaatatttaaaagaggtatgtgtaaagttcgtgacacataataaaagtctactacttggagatcattgttattatttctcctccttctctatgccaaatctctttgcatatgcactctattttgtaaaaatgttttgaatgactaaagatagattaatcacacgtattaagacacacaactttattgttgaaatatatatattagaaaagaaaatatggttcatttctaatgtgagttgacttgccccgtgtcaacaccgcaggccctggcttccctttacatatcctcagcacttctacaggcatacaccccttcctgtctgcagcagcaatacaatggtaagatgttttggccttggacaggggcctttccggcctgctgcacgcctccacaagtggactctaatttctactctgggtccaggatgttggcctcaactatgtctgcccagcaggtgaggacagccaaggtcagcatcatgttcctgatggccagtgtcaggcttctctccaacttaaacagggacaaaggagcattggcacaggcagaatcacgtaagatgggtatgaataaacatactaggggagtgaaccatgcacaaaataatttatgaaaccacttctaaggctactgtcatacgacattacattcaggaaaagtgctaggcctctaattggaagagaaaagctctagttctggggaaaaatactgaactgtgtcacttttcttggtgggatctctgttgggatgattaagcttcggagaggttaggagactctctagcactgcttctcaggccattaggtgcattagaatcacctgaggttcaacagacatctagaacgcctctgacatgaaaagtaaagacaaaaaagataaaagaaaaagcaacttggggaaatcagacaccatgcaattggagaaaataaataaataacattaatatcctctaagagaccaaagttttgcttgtgtggaacatgaacaagatgctgtaaaaaaggaatgttcagaaaacaaattaaccaaaatacttcttagaaatgaaaaaccataatagcagaaatttaaaactcagttgagtcaagaaaaaagctaaggaaatcttttagaaaaatagagcaaaaatgaggaggaaagttttaaaaaaacaagagagaaaaacatatttttaaaagacaggacatttacctaaatgagttgaaaactcatgtccacacaaaaacctgcacacagatgtttataacagttttattcatagctggcaaaacttggaagcaaccaagatgttcttctggaggtgaatggataaataaactgtggcacatccagacaatggaatattattcagcactaaaaaaaaatgagctatcaggccatgaaaagatatggagaaaacttaaatgcatattactcaatgaaagaagtcagtctaaggacaggctgcctgttgagcctgatacaaaagcttatttgtactttatcttaatgactgctatgattggagtgcccctgccaaaactcatgttgaaattttattgccactgatggtgttgggaggtggggcctttaagagttgattaagtcacgggagcaccaccctcctgaatggataagactgttatttggggagtgagtttgttctcttgggagtaaattagttcttataggagtgagttagttctcctgaaagcgggttgttataaaattgagcctggatcactcttgtggtctcttttgcacacactggcttgcccttcagctttttgttcatgttatgacacagagcaaaagccctcaccagaggctgccaccatgcccttagacttcccagcctccagagctatgagccagatgaaccatttttctttctaaatttccaagtctcaggtattctgctatagcaacagaaaacagattaagacaagaaccaggagctgatgggctccccattctcccatgtccccattcccacaccccattgcatggattagctaaagatactcatgtctccctgagctgagctgcaaagattaaaagcagcctccttcctcttcagccatatttttgccagctgttcaaaccacagccctgctcagatgccctcactgtgattaacaatcttcccaagaccttgcccactgacttccccaggtggaatcttctcaaagaaactgaatccagactctgtcccaaagacattgctcaacttacctcctgctgggaaccttcacatatcaatgatttactgctatttcccaaaagggccagctttgggcttttcagtctttcaaacaaaactgtatcattcagggatacccttaggcatctataaagaaaagcaaagaaatgaaggccacaaaagttacgatagtagttccttctgatgggggagaaggtgtatcaaacaagtgagcacacaagagctctcaaatcttcaatatgttaaccaggtttttactattatttttaaaaccgtatatgtgttttataaactcttctgcatgtgtgacacatttcaaaatataaacaaaaaaagtttgaataaagaattacctagggaacttgttaagaagttagattcctagctccacttcatattctgacttcagagacctggtcaggaccacagaatctatattttaaaatgatgctgatgcaggtgattcaaaatccacactctgcggtaccctaaatggttgaagagcatcacaaactttggcatcagataaacctaagttcaaagccccaactcagttgactcctgactgtgtgatatcaagcaggttttcttcatctgtaaaataaggatgataaacttaacacagtgcctaggacctactaactcatcaacacatgttggccacaaatattattattacttttagtgaattaagagtgtatctcctcaggtgtggcaatttctattaatctgtccctacacaggtaaattttccagataaaaatttacttagcaaagagagactactattcttaaaagctttcccataagccttaaacttttcaaattctttaactaaatctgagaatctaaggaaataaccctaaacaaaggaattatttataatagcaaaatattagaaatagctacaacaaaagtaaggttatacacactgtaagctatattcatagaatggagtataatgtagccattaaataggactttttaataacatataaaagttattttgtaatgctaaataagagccagatagacactattatctaccacatcatcaaaagtatgcattaaaaaaaagtaaatcagtttccatagaaaataatggaatagaccaaaatgttcaaacacagggtgtctttggagtgagagatggtgattcttttcttcctttttactttttcaaatactctataatggggattgggggaaacctgtgagtgtgtgtgtgtgtgtgcacgcgtgtgtgtgacggagtctcgctctgtcacccaggctggagtgcagtggcacaatctcggctcactgcaacctccacctcctgaactcatgtgattctcctgcctcaggctcccgagtagctgggattacaggcacgcaccaccacacccagctaattttttatttttagtagagatggggtttcaccatgttggccaggcttgtcttcaactcctggcctcaagggatccacctgccttagtctcccaaagtgctgggattacaggtgtgagccaccatgcccagtctgtcactttttaaaagtgtattattttgttatatcttcaaatctaaactaatttaagcgttctgcatcagctaggattcataaaagacaatgacactttcacacactgtgcaggctactgaagcagaagttatgctttagagatctcatctaacctgagcccaaggaggtgaactgacaagcacaaggggacacagatgtctgaggtccaggttctcttcccaggcctcacaatcccatctaacactcctcccacttcattacactgcccctgcgttttcacaatacagactgttaaatacttcagcctccaaactcaaaagtgtggtcctggaactagcagcagcaccttggagcttcttagaaacgcaggttatcaggcctcttccctgagaaaggaaatcagaatctgcattttaacaagattcccagggcaaggttctcagagaagtagcagaataagagaaagtctttctttaatggtttaatttcagttgaagctgacttagttgaccaagttaaaacagtgatctcagtcccaccattggctgtgtgacatgaagcatgtttctcaacctctctgtgcctgggttttttcatctgtaaaatggggatcataaacctacatggtgcatagcaagtgcagagatggaagcagggtgcagtacctgtaaacagtgcctgtaaataatgcttcttgttggttatgttttgacaggcctggcgctctgcacaagctgtgcaatgcttggcacatagttaagtgctcagccagtacgtgtttaataaataaccaacaagagcataggttatcatttatcaatttttgacttgaactgtcccattctttagtatataacattctcaaaactgccagttttctgcatcccaacattcaaaactgtgccagctctcaccagatggtgagaaagtgcggaggctgaaggtcatagataagcttaactcatactgtaaatcattcctaccagaattttttttgagacaagtagattttatttacaaatttctccctctaagtgatcataaaattaaccaatccaggatgcccactgctgattgagtacaggcagaatggtggggtgttctctggtgtctgttgtggctgtggaatccatggttactaggcagagccctgtggcagcaccttggagcttcttagaaatgcaggttatcaggcctcttccctgagaaaggaaatcagaatctgcattttaacaagattcccagggcaaggttctcagagaagtagcagagtatctttaatggtttaatttcagttgaagctgacttgattgaccaagttaaaacagtgatctcagtcccactattggccgtgtgggactgcagtgtcatggaggggctgcgatcctctgtggaggtggaccctggactgaaccctgggaagctggatgaggagatggtggggctgccgccccatgacccaagtcctcaagtcactttccacagcctccatgggaagacactggtgtgtccacacctcacgggcttagtgatgggtcttagttttattcagacttagtcaatgtattaggaatggactccgtgtaacgtgggcatggagtatttaacacacctcagactgtggttttcgaaccgcctccattagcatcatttaaaaatgtggatgctgggccggtcgcagtggctcacacctgtaatcccagcactttgggaggccaaggcaggcggatcgcgagatcaggagttcgagatcatcccagccaatatggtgaaaccccatctctactaaaaatacaaaaattagctcagtgtacccgcactccagcctggcgacagaacaagactcagtctcaaaaaaaaaaaaaaaaagccaggcacggcggctcacgcttgtaatcccagcactttgggaggacagggtgggtggatcatctgaggttgggagttctagaccagcctgaccaacatggagaaatcccatctctgctaaaaatacaaaattagctggacgtggtggcgcatgcgtgtaatcccagctactcgggaggctgaggtaggagaatcgcttgaacccaggaggcggaggttgtggtgagccgggatcacaccattgcactccagcctgggcaacaagagcaaaactcttgtctcaaaaaaaaaaatgtggattctgtggtcctgaccaggtctctggaatcagaatatgaaatgcaactaggaatccgccttcttaacaagttccctaggtaattctttattcaaaacttttttgatgttgtttatattttgaaatctgtcacacatacagaagagtttataaaccatatatacatagtttctaacataaaaattaaacaaacacctgtgtacccactacccaggttaacatattgaagattgggagctctggtgtgcccagttgtttggtacaccttctcccccatcacagggaactactatcctaactttcgtggctttcatttccttagtcaacctgttaggaatcgactccatgtaacatacgaaaagcagcttgcagaaacactggattcacacatggaggagaaatgccaactcacaggcaagcacagtgatgacaaaaaaaaaaaaaaaaacactgcagagattgagggatccttagaggatgtcggtgtatgaaaaagtatttaaacatccccagttttgtagatgcttataaggtgaacagcaccaacgcaatgctgatgcagaaattcacatcccagcggggcacagctgctcacacctgtaatttcaacactttgggaggccgaggtggacagatcacctgagtcaggagttcaagaccagcctggccagcagtgaaacccatctctactaacaatacaaaaattagccaggcatggtggcgggcgcctgtaatcccagctactcagcaggctggagcaggagaattgcttgaacctgggaggtggagattgcagtgagctgagatcgcaccattacactccagcctgggcaacaagagcaagactccattgcaaaaaaataaaataaaataaaaatcacatccctggttcaagaactcaaagaagagaggtttaaagaagaaaagaaaaaagaagagagatccagactctctaagcaacaagaagggctggcagagacgttatctatgctggagtccctggaagaggccatgggagtcaccccatcacaaggagcttttccacaccagccaggcagccaagagccaagccctgctgctcccttccccaggagggcttgggtcttagggcagcgctgttctctcccctccactcaggcctccagagctgccaggccaggttctcccatgttgactccatccgagggtccctgaggccagtggatctaggggagcccctttttgtgttgaagtttccaccttccccttctgacactgcagccagctccttcatggttgattcctccaaatctaaagaatacaggagaccctggagcacatcagcaaagtctggattctctctcattagcagcaaaagaaatgccatactttagagcctcatcttttgctcaaactgaaacatcatcaaactgcatttctcaagacaatgctctgtaaatattatttatgtattaatctcctaggtgaacaatttctattttatcctctacaaaattattgcactttgaaaacagatttcatttatcaatactttcggtactcaactgcaatattttttctagagttatagtcccaacaattttaagtcataagttaaagcaccattttttggcttgagtatgtatttgttgaaaaatttggccgggcgtggtggctcacacctgtaatcccagcactttgggaggctgaggcaggcggatcatgaggtcaggagatcaggaccatcctcgctaacatggtgaaatcccgtctccactaaaaacacaaaaaaaattagccgggcgtggtggcgggcacctgtagtcccagctactcgggaggctgaggcaagagaatggcgtgaacctgggaggcggagcttgcagtgagccaagatcgcaccactgcactccagtctgggtgacagagcgagactccgtctcaaaaaaaaaaaaagaaaaagaaaaaatttatgcaaagggagatttattttgggataaagtaaaagggaatgtttaaagagaaatttctataatatttagattcaaatagtggatatttttcaaaaaacaaaattaataaattacatggagatggttttatttcactacaagagtgatgtagggagagatttctaagaagaaatccccttggacaacattggggaaccccacatcacttttccccatctcctctcaattagccaccacgcctggctaattttttttttgtatttatacatttttattttggtatgtaagagagatacctgacaaaagtaacctgaattaaactttccatttaaacttcctctgtgtctttatgttgagtcaggcactgtatttagataactgtaaattatttatcaagtatgaatggaggtcactcaccctaatagttaaacagactggatttacataaatgtggggcaatcttggtaggggtggtcagcaaggcctctgtcgggagggagcacctgggcaacgaagacatagggaagaactttgtaggaaaagggggtagaactgacaatagccctgaagggggcatgagtctggtgggcgtgaggaccatgcagaggccagagtggcctgaactcagtgaacgatggccagagtggtaaatgagtgaagggtaccaggggtctgagaatggaggggttttccccacagtaagagtttcatttcaatataaaagttcagaggcagcctgcagggaacatagtaaagcaggaagaccaggtgggaggctgtgacagtcattcaagggtgagaatggtgacagctggaccaggggagtagtggagggggggatggagagatgggctcgagtccaggacctgtgctgctgccagagaccgagagactcactgaggcctgcgggtgccagagaaaaggggagtcaggatgaggacaaggagtccactgtgagcatctccctgaggggtggtgtcctttgctggaacagagagggatggcaaaggacgggcatctggatgataaattggaataaatgtttgggaggagacttgggaacaggaccttttgacactagagtagaaataccaagtgctcagatggacataggtggagaacttggaggagcaatcacagcatcagcaaggaacgtggaggatcattggggcgtgaagttactattacacagaagtccaagtcctgggcagattccaaggggtgaatgaaatgagtctgctagtgaccagaaccctcctcaggtctcccagtagccacaataccacaaaaagcctcaagagtgacctccccaagtctgttcccattaggggacttgagttgtgcagaatccgtataagacagcctccaccaaacacgtgtctatgcaggtccacgtgccatgtacatacgtacgactgatgaagatcccctccttgaccaagctctagccaggcttccctgagcccccttttcaactaggcctccaccttggcctatgaaatctgcagacttcagcaaaaaggatcgggtccatccttccccctatatcaaaacgcttaaacacacagtttctttttctttctttttttttgagacggagtttcgctctgtcgccccggctggaatacattggtgcgatctcagctcactgcaacctccgcctcctgggttaagcaattctctgcctcaagcctcccaagtagctgggactacaggcactcaccacgatgcccagctaattttttgtatttttagtagagacggggtttcaccatcttgaccaggctgatcttgaattcctgaccccgtgatgcacctgcctcggcctcccaaagtgttggggttacaggcgtgagccacagcgcccggcctaaacacatagtttttaactgctcaaagctgcatccataggatgaccccagaccccctaaagtatcttcctgggaaagctgccaaaagaactcactgttggctattgccaacaccttacaagcagcccctgatgtccctttcttaaagagttaacaacaacaacaaaaaactaaacaattgtgaatccttcctctgtctctctgggatgtaatgtctcctacacatcaggagtatccttctcaagaacctgaaagccattcctccaacatgcaatcaccaggaagcaaagggcctatctcccagttactgtgggaggataggaccctgactcccataacagccatctaacaggcactgtcgcctaaccttacttacactgacccacccttcacaagtttcactttcctgactactgagttcctgctcatccccttcacattccctcctcctccctcttaaacacctagtcacttctgcacaaagttcagttccgttcacgaggtaccttcttccctattacaatagtatattattaaaatctgctttaccacttttactagtgtctagctttatcttctacagttaatacaaatatacgcacatacacatgcatatatatgcacacataataatatatacatacacacatacacgtatatatacatctatatgtgtattcttaatgaatgttatgtcttctctaatcgtttggaagatattatcaagtatttctttgcagttttcctatgatctctgcgtttcttttctgttcctttggtcccttgcttcggtgtgtgttttctttccatcttttatgctagaggaagtccgcaagcaacaagtggtcctcggctcccactcctatgtatgtatgtagtaggaaggaagccgctgagtgcagctgtgcgcgccggggcggtgcctgtgcctctctggattccgtgtttcttcgggggtgctgagcagcggtgcttccgcgtccgcgttctccgggtagctgatgtgctgcaggctgcagcccgcgtggtcgcggctcaggtccgtgttgggctggtaggactccagcggggagcgagcattcctccggaacctggggctggacgacagcagcaggaggcgtgctcccatctccggtagtccccggctcccgctgctcccctttctccccggcctcgggcgctggcgggcgcgggcgagggggtagcgcaggggaggcccgcccgccacggcagggggcggaaaccgcggccgggctcggggtcagcggcgacgagcgggcggctgccccgctcgccctcggcctccgcgcccgcccgccgctccgcagcggaggagccctcaggtttgcgttactgcggccgccacacctacctcagcccgccgcggccaggtcgggcggtgccgcgcaggccgcctccccccctcgcttcccagtcggcttacgcatccccggcggcggcggcgccggcatcggctagaggttcggctcaagtcgggggcactcgtgtctgcgccgagcggcgggcgtgagcgcggcccctgggccccgcgcggcgcggtgctgcgaggaggatcctcgtggccttgccccgccggcggctttccagaattttctacgattacgaagttttggcattcaaccctccatcctctcaaacgccccactgttactccgcccccttcccctaggccccgcccccagccgcagtgccctgcctcttccatccgtctccagcctcctccacggccccgccccctcaggccggtccgtctcccctcccacctcacacctccgccccgcccgtcagccctggctccgcccagccacggggctcgccgccacaggccccgcctccagctcgcggccccgcgcgccggatcggcgtgcgtgcggctggagccttaagcgtttcccccgcccggcttcatccctgctggcggcccagcgtcgttctcctcctgcgcgaggcggccaaggcctgctggcccggagccgcgcctccacccgcgcgaggtagggcttcgaggaccggcgcggcgcaggtctccggaggcctcccgagaggggctagggtcgccgggccgcgcgtgggagcgggtggggcccgggaggagacggcgccccggaggggagtgcgaggcctgggccgacggttacgggcgccgaccggcgttgcctggcctgaacgcccggcctttcggtggagggcagcttgcccctgtatgttgcgcccttccgtgggtcagaccggcggcaaggtgaggcggcggcggcagcagcagccgccttgggctcctggacgcgctcccgaggtggggcgggttggggagtggggattggagcgtgatggctggacgtcgccttctcggcgcggcaggtcccgggagacggggggacgaggcgcagtcccgccctcgggagagcggagccaccttcactgagggcgcccggtttggccccggaaaggcaggaagggggcggggaagggatggcgagctcggggtgcaccgcctgtttcttttctggttaggtatcgtccttggagaagatggaagcggagaggcggccggcgccgggctcgccctccgagggcctgtttgcggacgggcacctgatcttgtggacgctgtgctcggtcctgctgccggtgttcatcaccttctggtgtagcctccagcggtcgcgccggcagctgcaccgcagggacatcttccgcaagagcaagcacgggtggcgcgacacggacctgttcagccagcccacctactgctgcgtgtgcgcgcagcacattctgcagggcgccttctgcgactgctgcgggctccgcgtggacgagggctgcctcaggaaggccgacaagcgcttccagtgcaaggagattatgctcaagaatgacaccaaggtcctggacgccatgccccaccactggatccggggcaacgtgcccctgtgcagttactgtatggtttgcaagcagcagtgtggctgtcaacccaagctttgcgattacaggtatggtcttcgtggacactcactgtcccagaatgcgccgtgggaatcaggatttcatagagtggtgtagaggcctgctttaatctctgctgatgacctaaactcattttgaggaaacaagctaataaataaacatccctgagtttgtgcaagcgtggcagctttgcagtagtcatttgctgagacgatgcatccagcctccactcctcagccagcctgcccttttgggtaataaaacttggctcctaacgttaatacagaggtttctaagtggtgcctgcttcatggccactgtatattttagcttttgttcctatcgattatctccttattttaaataaggaaaaatgaaatatggacaaattaacttttcccttcagccgcaaaactgatgggtcacaggttttgtactatgaatgtgcagtgaaaacaagtgtcattccaaggcagcacttttatgtcttttgctaatatagctgttggtaccatagcgaaatatactcaaaaagaacactgaaaggaatattccttttgacgcttggtctttcaggacatgtagaatcttagataagtgaccttgattaagccaagaatattttaatgtcttttatatacacactggacaacacatttttgtccttaaatattgtttgaaaataggtgaagatgtcctttgctgatgttggaaattggtaaaggagaatgctgctttgcaaatgatctattctaactcagttcacagttgagaaaattaaagcccgttaggtccactctggtaaaataggactggcctccaggatttccagctctggactaacacttagcctcctttgagccttaagtctggacatcttcattgtaatgggttttatttctgacaagtagaaaggcgcataaacatgcttaagaaatgaaataggcagtaaataggaagctgctttttaatttttttaattttttttgcagaaattctttcattagcatgaacgctattataatgtcaatacctgtttttaagtcttattttaaataattttacacattatcaaagaggcttaagaataaatgttcaaaataatgtattctagacaactacaaagttttgtaaccatgcatttttatttggtatctttaaaaattaaatgctgtccttctggcatcagtgagagccaagttagcagggactttaaataaatttcataatgaattgagtattgttctatttccttcccttctctggtgtagcctccagcagtctgtgtctgtgcagaattatattaaaaatggtttccataaataaccgtatttcaaatactcttgaacacataatcatgcttctgatcctccacccaaatgatctttctaaaaatgcaaatctgatcaagtccctgctctgcttaaaatcctttaaattgctccccatcgggtaagctgactgttttacagtgtaaacccctaagtgctttttcacagggtacataaggtcctagtactttctggcctctgtccttttagttttatctaccaccacctgcattaaactttatgcaccagcaacactaagcttcttgtaatttccttaaaacgtcaggcattttctgacatttctgcccctttgctcaaagctttcctctcagtattcttctggctagcttctaggcacccttaaagacccatcccatgtccttgtcctttccttcaggaactcttacctgatctactcagcttccctcctcccccagtttttcctttttggtgataacgtaatatcctatatctcagtggttctcaaagtaaggtccctagaccagcagcatcagcatctcttcaaaatctgttagaaatgcaaattctagggttgctagatttagcagataaaaataaaatattgcagaatttggaacataaaaagtttctctgaaattcaaattcaactaggcattgccgtttttttgttttttttttctggcaaccctagcccaaccccagacctactaaatcagaaacttgggctggacatcagcagtcttggttttaacaggccctacaggtccttctaaagatggagaaccactgctatatttacatatctttaaaaacatgcacctccgtctcttaattttgtatcctcccattgagcacactgaatctgtgtgataataaatcttcttttcttcattagtgcatttttacagagtaaccccttaccccatgatagaaattgtctctgtgtaatttaggagatgtttattattcccaagagaagagaccacagtgtcctgaagttgtacatattctacagtgttctgaactgatttatgttggccaataattgtatacaggattacagtctcctgtgaccttctgtaggaatgagatattttggaaggagaaacaaaataaatagctacttagaacctttaaacacagaccagacagtcctctggattttatctagccctgaggagagctccttccctgtctgcatctcattcttagggaagtgagtgaactctgcagacaagttacatttcaaaggacactaatgagagatgatgactgagtttaaagcctgcagaataagtgagaaaggccctttaatttatactcattcgatcattatacttattgagcatctatttttgttctagacactgctagagtctactttgtctgtagattttttctttttgtgtgctcctgtttctacccccaaccactacatcttctttttcttcttcttatctctcctctgactaaaatagggaattaggttatatttttacatattcaatatatttattaaatgaacctttgtttcttgtagtgttctatctcattaagagaaaaagaacttaaagtgctttttaatttattggactttttattcattacatctaccccacgcctcacacacaattactgtgattagtaaaacaaagctgctgactctcagaaggcagttagattggcctcagtgtaactagtctcagctttgatcataaattttgtttctatattctattggtgtgtgtttattcatttcattaattatctgaaacagtgaaagataccaaatcatcttctagagcagaggtgggcaaacttactgtaaagagccaaaagaattttcggctttcccaaccatttcgtctgtcataattacttaactctgccatagttgcagtgcaaaaccagccatggacaatacataaatgaatgagcttacctgtgttccagtaaaacttcattcacaaaatcagatggcagacatatttgcagtttgcagaaccctgttctagtgaatcttataaatgaccatctcaactttatgtataattcagctgcctccttcagcacactaaaaaagagagctattgtgaccaggtaattttttagagaaaacaagccttgttaaaccttttttttttctataaatactactgcacaagaacggcatataaattcatgaggcattccatattttcatatgaaggaactttctagagtaatgttctatatcttgataagggttttagttacgtatgttcatttatcaaaactcaggaagtatatacgtacatttcattgtatgtaaattttacatgaaaaggaaaaaacatcatgaattctaggtagtgataagcctatttgctgatgtattcaggaagtattctgatgtcttcagtttacttggaaatgtactaaaaataagatgaattaatggatagaaatgtgacaaagcaattacagtaagatgttaatggtagaatgtaggtggtaggcatacctgtaaaaaatatttttaagtaaaatattttaaaaagcaagtaaactattcttgcttttagaatatatttgctaaaatattgaagggtgagatctcatactgtctgcagtttactttcaaatgatcaaaaaaatatgaatttatatggaaagagaatattgtgggagaaaatgtcattaagaatcagcgtgaagggtgggcttagggtattcattttgctatccttttgacttctctgaaagtttggaatttttcaaaataaaaagaaaaaagatgataagctgttacccaatgacatgatgctaaagctgaaataccaagacattttagtaatgtcttatcttcccagtgagtttgaaatctaggttgttaaataccaattacaacataggtaaagacaataggattcaggtttgaatatggtatttctaaagaagaatgtaatactgagtaattagtaagcattttattttattttgttttttgagacagggtcttactctatattgcctaggctggaagacggtggcaagattatggcttactgcagccttagcctcccaggttcaagcaatcctcccacctcagccttccaagtagctgggactacagacatgcaccaccatgcctgatattttttttttcttttttgtagagataggagtatcaccatattgcccaggctggtctcaaattcctgggctcaagcaatcctcgcatcttggcctcccaaagtgctgggattgcaggcgtaagccaccatgcctggccctagtaagcattttagctgtacctttatagagcaaaggctcataatagctattatcttggttaaaataatcttttctgggctgagcgcagtggctcatgcctgtaatcccagcactttgggaggccaaggcgggcagagttcgagaccagcctgaccaatatggagaaaccccatctctactaaaagtacaaaattagccgagtgtggtggcgcatgcctgtaatcccagctactcgggaggctgaggcaggagaattgcttgaacccaggaggcggaggttgctgtgagccgagatcgcgccattgcactccagtctgggcaacaagagcgaaactccatctcaaaaaataatagtaataataataatcttttctgaaatttatgagaatttaataaatgataagtgttctgtcacaaattattgggggtagaaaagatggttttatgaatcgtgttaggacaagtgctcttgggggaggggagaaggttaactcttcataatacgccagatttattatgggtagattaatgcagtagtttgttttgttgttgttgttgttgttgttgttttttgagacagtctcactctgtcgctcaggttgcagtgcagtgacatgatctcggctcactgctacctctacctcccaggctcaagtgattcacccgcctcagcctcccgagtagctgggattacaggcatgcaccaccacacctggccaattattttttatattttcaggagagacagggtttcaccatgttactcaggctggtctcaaacttctgacctcaggtgatccgcccgcctggcctcccaaatcctgggattatacgcatgccccactgcgtccagccaatacagaggatggaaaagcccgacacttccatgagattctgaatggaatctatagccccagaaggttaagaagcactgaattaaagatgtaactatgacaactgaactgggaggggggggaataactataggtgaatatctaggagatggtaaaagacttcaaagcataacagcatttaattaggtgcctgtagcctagctactcaggagactgaggcaggatcacttgagcccaggagttcaggccagtgtgagcaacatagtgagacactgtctcttaaaaaaaaatttttggccagactcggtggctcacacctgtaatcccagcactttgggaggccgaggcagactgatgaggtcgggagtttttgagaccagcctgaccgatatggtgaaaccccgtctctactaaaaatacaaaaattagctgggcgtggtagcatgcacctgtagtcccagctgctcaggaggctgaggcaggagaatcacttgaacccagtatgtggaggttgcagtgagccgagattgcaccactgcactccaagcctaggcgacagagtgatactctgtctcaaaaaaaaaaaaaaattttttttaaatgaaacagcatttaagccaactacaaacggaaatacatatctgtatatatatttttaaaaacttaagtagattaaaaagacaattttaaagaacactgaagcatgtttgcaataaatatgccagaaaaaaggttgatattctagttaaataaaattacatgcaattattaaaacctagtgaaagatgaatatggaacatgactgaattcacaaaagggggctgaaaaactcagttttacctactaatcagacttccagattaaaacaataggatacctttttctatcaaattatcaaagaaaaattaagtactaatgagcggtattaataagtgttagttatgatgggcactttcatgcactcgtaacaagcatattggacaaacatccagaaccttgggaaaatgcatgccctttgattcagtaacttctgagattgcaaagaaataatctcattcatttacccatgttatttatattttcaaaaataaactaaatgtcttttttaaaaaacagaaaaggggtcaggttttttttgttttgttttgttttgttttttgagatgaaatctcactctgatgcccaggctggagtgcagcagcaccctttcccgggttcaagtgatcctcccacctcagcctcactagagctgggactacaggcacacgttaccacgccaagctaatttttgttcatttttcttgttttttgggacagggtcagataaattatacgatattgacatgatgtaataatatacattctttacaaaccatgttttaaaaaaattgatatacaaaaaagtttatgatacaatgtagaaaagcattatccagatatatatacatcatacttctaagctgaaaaacaaacgtatacactataaaactgagaataaataagtcaaaaagttaagagtgactctctggatgatttttattttatgcctttttgtatttttaaatttttataagctagtatttaaaataatttttaaaatttatacaagtagttcatgtttatattctggtttttaggatctcaaggaatacatacaaaaaaaacatagcctaaaaacttaatattcttcccattcctcagtcctacttttcttcccagaggaaaccattatgaaataattcagtgggtatcctttctgattgcttttgatggtgatatactattttaaagttatggtagaccaataaataaagatattatacttcagccacataaccagtctattatagtttctcaagttgagtttaaaattaacaaatgtgattatgcaaattatttcagttttctctgtaacagattatgcagagaactcttgcttttagcagtaaataggactcgagtatacagcactaagtacttgacaaatctgaatatccaaaaggaaaaaacagcttaaaatagaaggtcaccagaggacctctgggtgaaagaatgtttatcctcttttcttttttatattcatttaattataaccattcttttctggtggcctgctttatctcttcagtcagatctgccttatctgtgagtggattaaatacttagcaaattaataatagaaacccaggacctttaccagctctgttctctgcttgttttaccaattgggtccaaacatagttgcaaatctgaatgcacatgttcttacgtctatttcaaaagcaagcatatgaattattttcgtattaactgacaaaaagaaatgcacggttgtacttacatttacaggttaagagattttcaagctggaccctcaggaactcttcaagggtccatgtcagtggggcatttaaacagcaaggactttaggcctcatgaacctacatttcagccaaagcacaaatatatataaaactatcattttagatcagcttttgtttatgtggatcatatctattgatatttaccatgtcataaattaaaactgataaattttttaaatatttttaaaataatagttacaaatggtttttatgaaaatttagtgaggagagttacattgttttaaatttttgcacatttctttcacttattattcagctagagtatcatatttgcttctattgtcatagcacatgtcataaagcttctggaaaattccactgtacgcttttgagaggttgagggtgaaataactctttagtgttattattaaaattttaacctcacagatgccctgaatggatcttggggcccacattttaagaaatgctgttaggcggggcacagtggctcactccagcaatcccagcacttatgggaggccgaggtgggtggatcatttgaggtctggaggtcaagaccagcctggtcaacgtagtgaaaccccatctctactaagaatataaaaattacccaggcggtagtagcacgaacttgtaatcccagctacttgggagactaggcagaagaatcacttgatcctgggaggcagaggttgcggtgagctgagatcatgccactgcactccagtctggtggacagagtgagaccctgtctcaaaaaaaaaaaaaaaaagtgctgttagattaaactgccaaatatgttcaaaccttattgctccatttcactgtgcagatagtgcatatattttatttgccaaatgttatggtaagtagtgataaaattatgttttattttttaacaaaaatgattgttttgtgggttatcattgagattatggtttaaaattagttaatgcttgtttcttccttccctcaggtgcatttggtgccagaaaacagtacatgatgagtgcatgaaaaatagtttaaagaatgaaaaatgtgattttggagaattcaaaaacctaatcattccaccaagttatttaacatccattaatcagatgcgtaaagacaaaaaaacagattatgaagtggtaattagagtttatttctctaatatgattgatttttaaaaagctgcttaactcattgtttgagatagttaagacagtatgtaagaagaattggtgccaggaataaaataaacttaaataacagatcaagaccaaggagagaaataaaatgctattatggtaagccataaaatcctacctagttcctagagatgggtcaaaaattttggctcttgagttctttcatgtctaaaaggaaattggaaatgttatattagtggtttccaaatcattgcctgcatctgaatgatttagggagctttttaaaaatacagatttctgagtagtaccttcattgccatatttgatttagtaggtatagggtaagtccaggaattcatctttttttttaaggtcctcagaagattctgatgaacagtcagttttgggattcatgattattgtcagtgaaaagaaaatagattttcctcacacctttttctaaaactatttttctattttgaactttatacagggtccctagagataagtttatgttgcacattaaatgctcccacaaataatggtgaacactaaacctgttaacagtttatagatgtagatatgtgtatgaaattgatgtaacttattgaatctctcagtctttatgtagctcttaaggaaacatcataaaaatttatggatttattttctaattggatataccaaaataattgaactattttattttaaaattgtacctttttcaaattaagattttatgacttacatgccacctttgtcaatattcctgcaagggaagggacattttaaatttttcaaacaatattgttttgacagtttttttaaatgtacaatctcttatttatctgagttcaacctgagatcacaagagagaagaatctctaagtaaaactatagaataacttcattaatggttacatctacaaggagaggggaagaagaaatggttacattttgaaaagtattaatttcatttgactttgagctattagaagtccagattttttaatctgagtaccccattttaaaaaaagaaataaaaccttgcaaaacacaccagaatacatccagtaaaggaaaatcaaggtgaaaggtcagagaaaaaaatcagtgtctattctgtgaatggttgaaagttatagaaagacagattttcaactcagtttaagtccaaactttctaataatttgatgtagcagtgtaatgggctgcattactagtgagttccttatgtgagtgtgcgagcatatgctggatgacttatctagaataatgtagaagagaattaaacattgaatgggagcttaaattagttaatttctgaggttcccttccattcttagaattctttgatttttatattgaattgagagaactagtatagtttttatttcagcaaattatagcaccattgttctcaaggcatggaaaatgtgcttttcatctttaagatactaaaccttttcactcatggcaattttttttagctagcctctaagcttggaaagcagtggaccccattaataatcctggccaactctcgtagtggaactaatatgggagaaggactgttgggagaatttaggatcttgttgaatccagtccaggtaactaaagaaaaaaactttttatattaatgttttcattttccccaaaatgcaatgattattaatgcttcaagtcactaatcacctgatcataggaaagaataataattacaaaaagatcagccatttaaatatgtggataaacaggcactcttgtgggaatataaaatggtacaacctctttagaagacatcttggcagtttcttaaaaagataaatataaatttattatatcttctagcaagtcctctactaggaatctacccaagggaagtgaaaacatatttctcacaaacatttgcatgaaaatgttcacagcagcattattcatgatagctgaaaagcataaacagcccagctgttcatcagctgatgagttgataaacaaaatgtgatgtagccctacaatggaataccatgaaatgacaaaaaggaacaaactactgatacgtatatattacaataaatgaacctcaaaaacatactaagtgaaagaaggcagatacaagggaccttatattgtatgactccacttatgtgacttgtctagaaaaggcaagtctgtagaggtagagaatagattattggttctagggctggaaatggggagtgattgcgaatggacattgagggatcttattgaagcaacaaaaatgttctaaactggatgatggtggtggttgtgcaattcagtgaacttaataaaaattattgacttgttcacttcaaatgggtgaatcttatatgtaaattatacctcagttttaaaaataaaagggatcgttaaaattgaatataattttactttgaaaaattaaccaaaaaacaaaaaaatacaaaaaaattttaaagacaacccattgtgtagcaattagaagtgcaataactttgtccttccaatttgtattttttacactttcaatattatacagtttaagaaaattataaaaaatacagagaaaatcatttgcaatttctccatacaaatacatcagttctcttttttcttgttctttccattaattatctatgcatttactttacatattaacagtactataacaataatctagatacaaatttgcattctgatttttttaattttaatggtataaatatttttccttgtttcaacatagtcctcatagttacatatttaatgactaaaataattgaatggaaatagcattatttatccagtctctactgttgaaaggtaacactgtctctatgattgtactataaataatgccacagtgaatatttttatacatatttttaggcatttttgtctttcgaaatatttttctagggtcgttgacagaattatggataatcaaagttacttgcatttttatgtcattttctatgtattgcaaaattgctttccagaaatttgtgctaagttgcactggtgatttttttttaagccagtataagatatgaaacactaattaaaggtgaacttagcacattgtggtttatgtgaacaagaaggaggcaatgtggtatagtagataaactataacttttttttttttttgagacagagtcttgctttgttgccgaagctggagtgcaggggcatgatcttggctcactgtaacctctgcctcccaggttcaagtgattctcctacctcagcctcccgagtagctaggatcacaagcacacaacaccacactggctaatttttgtatttttagtaaagacaggatttcaccatgttggccaggctggtctcgaactcctgacgtcaagtgatccacccgccttggcctcccaaagtgctgggattataggcatgagttaccacacctagccttgtatttcagcacttaattacctggacaatcacaggcaagtgatttaaccttcctgcacctcagtttccagcccaatagaatgaggctaactcttgctttgtaaagtcagtgtggggatgagctacaatgaatataaagagtctggcagggtgcctggcatattgttaaatacatagtagccagtaatgttatttaactgtatctctactcatctagagggaaatcatcattacagatgaaggaaaatgttggataaaaataatttgtctttttcttttgtttctaggtttttgatgtaactaaaactcctcctatcaaagccctacaactctgtactcttctcccatattattcagctcgagtacttgtttgtggaggggatgggactgtagggtgggtcctggatgcagttgatgacatgaagattaaggtattagtctttaagaactactacagaaggacttctaagataaatatactatacatatatatatatatatgggttttgttgttgttttgttgttgttgttgttttttcttgagatacagtctcgcactgtcacccaggctggagtgcagcggcgcagacacagctaactgcaacctccatttctcaggttcaagccatcctcccacctcagcctacaaagttgctgagactataggtgtgcgctaccatgcctggctaatttttgtattttttgtagagacagggtttcaccatgttgcctgggctgctgtcaaactcctgggctcaagcgatcctcccaccttggcctcccaaagtgctgggattacatgggtgagccactatgcccaacctaatatagaatatttttgctttatattttttattatgcagatgaatattagacattgccagcttcaaatagttaaaaatgagatgttttgattaagcaattagcacaagctttagcaaaacaacatacagttgttatatttgtatccttactgttttggtcttattaaattttacaaaatattattacccagcaaatagtctgagagaaaaatctaaaacatatcttccatattctagggacaagaaaagtacattccacaagttgcagttttgcctctgggaacaggcaacgatctatccaatacattgggttggggtacaggttatgctggagaaattccagttgcgcaggttttgcgaaatgtaatggaagcagatggaattaaactagatcggtaagttacgtttccccaaaaagtagatttcttgagatttagccataattggttaacaagtgaagacttgtgtagatgaaatgtgccatgtaatttaaatgtgaaagactatactagttgtacctacacagatactggtgttttgttttattatgtaagagccgaagtaataagttacactgagtacttatccctaaatttgcatgctcatatacgtgtggttacttttgtagatggtattttaatagaaaaccctcatttatccaaacatccagagtatggggtttattgtaaaacgtgctgttttttttaacttctgttttttagatggaaagttcaagtaacaaataaaggatactacaacttaagaaaacccaaggtatgttgttagtgcctcagttgcaagtggtttcagcttcattgcacaagatacggcactctgtggtgggatacagagacctggtgcttatctcaagggagctggctgtggagcagaacagaagcttatatgcttacctcacaagctggactgtaaatgtgttatgggagagaacagggtgcaggtatgcttagttctgccctagctgagaagattcagaggaagtggtacgggagttggtccttaaaaaagcaaaggactttccaggcagagggaaaagaggtgagagagtgcaaagcatggttagcaagtagcaaataatacagagagagtagatctgtatttttaaaagatactctggagataatgtgaaaatagctcagaagcctgcactaggtagaatcaggatgaggacaatgcaaagacattttagaggtagaattaatcaatacttgacaactgattagtataaaggggagagagaaaatacatattactattagatttctggtttttataactgaatatatggaaatgactataagaaaaataccaagtttcaggtttgggtaggaagaaaatgagatagatattgggcatatcaatctaaaagttttcgtagtgttaaacaagaagttggacgtttaggcttattgctcaggaataaagacagagctagagatgcagattgaggaatctagactgggttaggaagtaaaataaactggggagggggcagggggagtagcccaagttgtgggattcacatccctatttatcagcctttgaactgaagccttatttctgataattgtttaaatgctgagaatgcataagagaatgtggggagtgagaggggaaaagagggccaagaactacatcttttctttttttttttttcttttgttgtggagacaaggtctcagtctatcactcaagctggagtacggtattgtgatgacagctcactgcagcctcgacctctgggcccaagcgatcctcccacctcagcctccgaagtagctgggaccactggcatgtgccaccatgcccagatagtttttgtttttgtttctgttttgtagagagagggtctccctatattgtccaggctggtctcgaactcctaggctcaagcaatcctcccacctcagccttccaaagtgttgggattacaggcatgagtcactgtgcccagccatgaactacatcttgcaaatagatatatttaggtgacacagattaagagaggccactaaaggagactaaagagtgtagtaagtaaataaggagaaaacagagaaagagaattacagtaggtgggtgataaacagcaaaattaaagcagactttaaagaagagcatttggggaacactgatgcatgtttctctgcttctccatctccttgccactgaaatccctctaaaatgtgcctctaaaagatcttgtataggtctttgagaaggcacaaaaccttaaggagaaagagatcacagcagtcttcagaagccaaaactaggaaggttcgcatattgaaaaaagctcaaaagtgcctacactgcagaaaaccaagaaagaaaccagtttattgagcagaaccaagcaaaggcttaggaattctatgcttacctcacaagctagactataaatgtgttatgggagagaacagggtgcaggtgtgcttagttctgccctagctgagaagattcagaggaagtgatacgggagttggtccttaaaaaaagcaaaggactttccaggcagagggaaaagagatgagagagtgcaaagcatggttagcaagtagcaaataatacagagagagtagatctgtatttttaaaagatactctggagataatgtgaaaatagcttagaagcctgcactaggtagaggcttctaccacatcactcagagagcagtagtatagagtcaccacatcactcagagagcagtagtatagagtggttctgaaaatagaaggagtgagcgaaagaagctgtttgtcccctagatcacttcccctttccccaacttcacatggtcatttactaccctcctcaactcaggtagtagattggaggtttactccggaaagtttagagactctagccagctaacgccatactgaaaacagatttagtgcaaagtgagatcactggcccttttcatccactcaacttcaagaatagtggcagagaggatttctctctggggaagctaacttgcccaagataaaaattaacacgtaccaatatttgagtgtcccgtagcaaaaggaccagatttttgcactgtagtcctataatgaagcttataccctagcaagagctgcttttggatgcaaagttcacagtttgccttttatgccttactcttaaaacatgaatatatacagccaaggattggaggcacaaacaaacatttaaggaaagcctctgccatgagagagccccaaagaaacaacaagaaagaattgtaggaaacacagtccaggaagctgaaggaagtcagggagtgggactaatgttctcagagaaaaatgaaaatattaatagaacagggttctataaaaggaacattcagaaacacatacctcaaaaaaggctcttataaactaaaattcggtatcagattggaaagtacaattgaagacaccactcagaaaatacaacaaaaagcaaaggaactggacatgggggcacacacctgtagttccagcaactcaggaggctgaggcaggaagattgcttgagcccaagagttcaaggctgcggtgagctatcatcacgccactgcactccagcctgggtgacagagtgcagataagaccccatctctaaaaaaagagaaaaagaatacagtaagtaacatttaaaatttaaaaatcacaaattggcggggtgcggtggctcacgcctgtaatcccagcactctgggaggctgaggcaggtggatcacctgaggtcaggtgttcgagaccagtctggccaacatggtgaaaccccatctctaataaaaatacaaaaattagccgggtgtggtcgtgggtgcctgtaatcccagctactcgggaggctgaggcaggagaattgcttgaacccgagaggcagagggtgcagtgagccaagatcacgccactgtactctaccctgggcgacagagcaagactctgtctcaaaaaaaaaaaaatcaagaagtaatgatctgattatgttatttagaaatatagagataaataccagaagaaactacggaaagagctctgggagcaggaattataaatgaggaggagtagacagaaaactgcagtgtttcctttgaagccttgtagaactatatagcttattaaagtggattgctttgatttattttaaaaaaaaaattgaacgtaaaaaaatagagaaagtattgagagatcctttaaaatggttcctgtgcttaaaagtatttgtcagttatcatagtgcctgaaatgccaacattaaagatgtatttctctttttgatagtagccaatctaataggtgtgaggtgatatagctcattgtggttttcatttgcaattctctgatgattagaaatgttgagcattttttcatatgcaggttgaatatcccttatccaaaaaaatgggaccagaagtatttcagatttctgatttttttggattttggaatatgtgcagaatatgtaccccttgagcatttctaatctgaaaagctgaaatccaaaatgctcccatgagcatttcctctgagtgtcatgtcagtgttcaaaaagtttgagatttggggacatttcagatttcagatgttcatattagggatgctgaacctgtgtctgttggccatttttatgtcttttgagaaatgtctcttcaagtcctttgcccattttttaataagattattggttgttattgagtaacttcagttccttctacattttggagattagttccttatcgagtgtataatttacagagattttctcccaagctgtgggttgcctcttcactctattgttttcctttgctgtgtagaatctttttagtgtgatgcaatcccttttgtctatttttacttttattgcctatgcttttgagatcatatcaaacaaatatcaaacaaataactgcccaggccaatgtcatgaagctttttccttacattttcctttagtacttttatagtttcaggttgtacatttaagtctttaatccattttgaattgattctttataatgggtgaaataagggttgattttcattgttctgcatgtggatatccagctttcccagtaccatttattgatgagactctcctttccctattgtatgttcttggcacctttgtcagaaatcagttggccatagatatgtgtatttatttggggcttttctatcctatttcattggtgagtaataacaaatgttggcaaggatgtggaaaagagagaatccttatacactattggcattgcaaattagtacaaccattttgggaaacaatatggaggtttctcaaaaaactaaaactagaattaccatatgttccagcaatcccatttatagatatatacccaaaggaattgaaatcagtatatcaaacagatgtccatgctgccatgttcattgcagcattatgtacaatagccaagatgcagaaataacctaagtgcccatcagtgaatgaatggtttttttaagtatgccatatatacacaatggaaaactattcagactttaaaaaaaaaaaaaaacaggaaaatctgtcattctcggcaacatagctgaacctagaggacattatgttaaataaataaaccagtcacagacaaatattgtatgatgtcacttatatgtggaatctaaaaaatcaaactcaaagtcgagagtagaataatggttaccagaggctgtagagagtagtagagtagatggagaaaggggagacattggttaataggtacaaagttttagttaggaagaataagttctgctattgcacagcttggtgactatagttaataataatgcatattttcaaattgctaaaagagaggttttttgtttttgttttttgttttttttgtgtttttttgagacggggtctcatttgaccatgcagtggcgtgatcacggctcactgcagcctagacctctagggctcaagtgatcttcacaccttagcctcattagtaactgggactacaggcacatgccaccacacccagccaattttatttttattattttcaatagagacaagatttttctgtgttgcccgggctggtctcaaactcctgggctcaagcagtccacgcccctcagcctcccaaagtgctgggattacaaatgtgaaccactgtgctcagcctaaaagagaggattttagatgttctcaccacaaataaatgataaacatttgaggtgatggatatgcaaaaaaaaatgatgtatttctcattcataccaggatgtattactattcagtaataaagcagagctgagtatttaaaaatatttatcttatcagagatcattcctccaaagaaagatggacaaagtttcacaccagttagatgattcaaataagaagacatgttcttcagccatttgctgtcaagaaataagatatgtcattaaaaataaatatactacaatcaagtagggtctgcttacctctatagaagaacatccaaacaatcaaataaaagaaggaacttcatttctctatacattcaagcaagtgttttgtgcccatctggtgccaggcactgtcgtaggtgctggagtttcagtgatgaaggccttgtccttatgaagcttatattgccccactcttagtttctgaataaaggacacctaggaaactagaaaaaaaaaattcagttaaaaaataaaggcaaattaatgtacattgacatattttatttaaaataaggtgtttatgggttttttttttaaagaacaactaggattgaaaattatattttggcagtgaagggacagacatttagttccataagagatgaacgggaaaagcatgaaaagaacaagtgaccaaatttagacttaaccatcaaaaggaggaagagcgtctttgatttggaggagaaaggtgcacttgagtaaagtcagagtttttagatggcagaaagagagcatgagaattcatacctttcatacctgaggatctcacttttttcagtgaggcaagaatcaagatcatctgaacataacaaaggcaggagagctggttatcagggacttgaagagaggtaaattttgaattaaaccactagggaatacaggaaaggagtcatctaaagggttactgtgtcctattagcgattgtgtccagccatccttagaaataactttgtaacaggatcataattataagattcttaccagcagtgtccagcaacctggaaatagagcagagaaaacagtttggtttagagaagattagcaagtaaggctggccgggcgcggtggctcacgcctgtaatcgcagcactttgggaggcagaggcaggcgaatcacgaggtcaggagctcgagaccagcctggccaacatggtgaaaccccatctctactaaaaatacaaaaatattagccgagcatggtggcgggcgcctgtaatcccagctactcaggaggctgaggcaggagaattgcttgaacccgggaggcagaggttgcagagagccgagatcgcgccactgcattccagccagggcgacagtccgagactccatctcaaaaaaaaaaaaaaaaggctaaattgagaagaggtcaagggtgtgttggaacgaaggatggtgttgagtacagtcattgaaatgattgaccttggaatccaggccgcactgggaagtaagataaattaaggtgagaccagtagcctgggttgggactaatagaagctgagagcttggaggctgtgataaatgtaaagagcaaatgtaatgggaacacaggcatgaaaagcctggaagcatcaagtagagccattctagatggtaaggtctgaggtgtagcatataaaacagaaatggaagatgagattcacatctgtagttatcagccttaaatggaagctttatttctggtaacttcactggacagtataaaatagccatgtgaaaagtaaatgcagaaagcatctccattgtcaaaagaacacaaagactaagattgacatttaattatgactcaagcttaggtggaaccatagtctgttgcttattcttaccctttctcacaggaattcacaatgaacaactatttttctgttggacctgatgctctcatggctctcaattttcatgctcatcgtgagaaggcaccatctctgttttctagcagaattcttaataaggtgtgttggataaaataacatttcctgcttatcaccgaaggtacagtaaaaatcaatagttcaattatatttagcactcctagattcagatttaactaacttacagaaatatttacctgctctgttttgtgtagggttgtcaaattagatcttttttttttttaattagatctttaaatgtgctttatcaggccaggcacagtggctcatgcctgtaatcctagcacttttgggaggcggaggcaggtggatcacttgaggtcaggagttcaagaccagcctggccaacatggtgaaaccctgtctctactaaaaatacaaatttagccgggcatggtggcaggtgtctgtaatcccagccactcgggaggctgaggtaggagaatctcttgaaaccaggaggcaaaagttgcagtgagccgagatcataccactgcactccaacttgggcaacagaatgaaactccatctcaaaaaacaaaacaaaacaactttatcaaagtattatataactctaacaaattttttaaattcaaatttgggatgttttataggatattttgcttagatggcaactaaatggaatatatgatagtttatcttaaatggcagctaaaattggaaggaaattttaggcagaataaatttttggtgaagtcattaatggaaaagtagatttcattggtttgaaaaacctccaaaaggcagatgagataaaagagcagcctgtttgccacagctttgaactaaggtcatctctggtttctagtatagttgattccgttgatggaattttgcttaggaatttttttaataacgttcggtgattgaccaacaggatatcaaaaataaatgcctagcaattatattcctggttctgttttacaaatatttcaaattttgaaatagttcccttttattaatatagttactaaggtaatacgtattactatttatacaattgataattaactcagtccttacatcaacctttttgtattcataagtgattagaaaatgtttgttagattaatacgcattactattcctaagtaatctgaagtactaggaaaaagtggaattttctaattcgaatatttttctttataaaatacaacttttttgataaattgggagaaaacaccatttagaaaaaaatcacttctaggccgcgcatggtggctcacgcctgtaatcccagcactttgagaggccaaggtgggtagatcacgaggtcaggagatggagaccatcctggccaacatggtgaaaccccatctctactaaaaatacaaaaattagccggatgtggtggtgcacgcctgtagtcccagctacttgagagactgagtcaggagaatcacttgaacccaggaggcggaggttgcagtgggccgagatcgcgcagctgcactccagcctggtgacagagcgagactccatctcaaaaaaaaaaaaaaaaaagaaaaagaaaaaatcacttctatcccacatttcccctgagaaagaggataattaaacttaaatggaatggcctgtattgtcatcttccaaaaaagaaggatgagtaatatttcatctactgtaccacagttcacctagaacttttaaactattaatagcctaagagaataaaatgtaaaatacaaatgatgccaaaagtatctgtaatatgttaaaggcatttttatttttacattgtgttttgattatagatttccattgctgctcctagtggattccaattttaccctttaaaattactagaatggaggtgttggatagggccagaggttgcacaccaaaagtatcccctttggttgcccttcttttcatcagcatctagtctaccataaggagaatgtgtgcttcaacattcttaaagggagctttgatacagcgtattttttcttattgtttacagggttagattgttttaatattatattttctgtccatttttcataggcggtttacttattctatggaaccaaagattgtttagtgcaagaatgtaaagatttgaataaaaaagttgaggtaagctattaacactttttattttttaaagttttaggtggtctctggattatgaagactttttaaacagaaatgctaaactttgttaatatattttgccagcatacatagagtatttatttgtgtgccaggcactttgctacatgctttatacacattgtccctctaaattctctccacaattctataaggtatgtattatatattcacattatgcagaaaagaaaactattttaaatgaagtaatttgcccaaattctctcatttaatgcctaaatgcacatgtaatcaagatgtgaacccagatttatgtaaatccagtctgtttaactattagggtgagtggcctccattcatacatgataaataatttacagttatctaatacagtgcctgactcaacataaagacacagaggaagtttaaatggaaagtttaattcagattatttttgtcgggtatctctcttacataccaaaataaaaatgtataaatacaaaaaaaaaaaaattagccaggcgtggtggcgggcgcctgtagtcccagctacttggaaggctgaggcaggagaatggcgtggacccgggaggcggagcttgcagtgagccaagatcgcgacgctgcattccagcctgggggacagagcaagactccgtctcaaaaaaaactaataaaaaataataaaaatgtataaatagtaaaaatagaatattaatgattgcttattgcaacagcatctctgacatcatgatatggcagtctttttttttttgagatggagtctcactctgtcatccaggctggagtgcagtggtgcgatctccgctcactgcaagctctgtctccctggttcacaccattctcctgcctcatcctcctaagcagctgggattacaggcgcccaccactacgcccggctaattttttgtatttttagtagagacggggtttcacgtgttagccaggatggtctcgatctcctgacctcgtgatctgcccgactcagcctcccaaagtgctgggattacaggcgtaagccaccgcgcccagccagatatggcagtcttatatgtattccttgcttgattccaaaaagaatctgtaatggttaatagcaacaacagagacattaattcagagaaacctagaactgataaaataaataaaaagagatcataaacagtttgggaaaagagacaatgagcagggagtaaggagactgattatacattagtcaaggaaaaatgttgccgttaggcgtaatgtttagctcaaagtctctgggctgccatggcgtagaagtaagcaagattttctgttaaaaagagtgttatgttactttatcatattttatttttcctaggctttgatggtagagtaaagcatacaagcatataaaataaagacttttattttattgtctgacattttatttatataaaaatacaaattatttttaattatacagaaataaaataaattttatttatatacctacaaaatagtcattgtcctcgatactggaggtagacagtgataaatcccttgctctacatttacagtctagggtgaagaaagatatttaagccagtctgggcacagtggctcatgcctgtaatcccagcactttgggaggccaaggtgggaggattgcttgaggcaaggagactagcctgggcaacatagtgagactccacttttataaaaaataaaaatagctgagcatagtggcatgtacctgtggtcctagctgctcaggaggctgagggaggcagatcacttgaacccagcaggcagaggctacagtaagccatgattgtaccactgcacaccagtctgggtgacagattgagaccctgtctccaagaagaaaccaaaaagatatttaaatcacattgcaatgcagtatgagaagttatataagaaaagcatgtggtcttacaggaataaataactgcaatacgtaacctaggagctacagagactagggaaagtggcagtataagcaagtctttctggaagaagtgacaagctggaatctgaaaataagtaagagttagctaagagaaggaggaggggaagattgctgtaggctaaaaacagcatctgcaaaagacccagaggcatacatggcatatttgagtgagttcaggctggagcatagctttcaggaaggaaagacaagcgctgaggctagagagatggacagaagtcaaatcacagagtgtcatatttgcctggtattggatcttgtatttcatcatgggcattgaagggttaaagtgaagccactgaagggtggtaattagaggatgacatatttgcattttttaagtgtcgatccaaccgctctgtgagggatgcataagaaagtaaagctagaggcagataggccagatagaaacattttagggaagaaatggtgaagagagagaaagacatagaaatagcatcaacagtttttagtgattaaggggatgtggagggtaaaaagtcaaagaaatcaaagataactgccaggtttctggcttaaacacctgggttgggggtgagttaacctacttaaccaggaaagagtaagtaagagttagctaagagaaggaggaggggaagatgttactctttcctggtaagtacattggggaacagggagcaaattgcagaaaagttgcttgatcaattttttacataagagtttttggtgccagtccatggacatgttttatgggcagtggatagatggatctggcccagtttactttcctgagaaggaacatccagggaagtagagtctgtggttcccaggaagcaaagggaaagaagattttaggaaaagaggaagggggtcagcaagtgtcaggtgctactgaaacagcaagttaggtaagtcctgaaaaaatcacgaggctcaacaaaaagaacattattgttgatgttgatagaagcagttctactgaagagatagaaaagggcagatgagaggccctgagtgagaggtagggagcatcttctacatgtgcatctctcatatataagcacatttatgaaaatagatgtgaattctaaatggatgtgtgtggaaattgtgtatcctgtagtcactatctatttgtatttctttaaagctagaactggatggtgagcgagtagcactgcccagcttggaaggtattatagttctgaacatcggatactggggcggtggctgcagactatgggaagggatgggggacgagacttaccctctagccaggtatgtacatttgtggtctgtttttttatgtcactattttatttaaagcaatctcttgtttatagactttaacatttttcctcaaattttcttttttgtgtatctcattagttataaatattttttaagttgatggtccaactgtgttaaaaagtaattgctctagcataactgattttttattgcatcatataatccatattttctttttccaattttaggcatgacgatggtctgctggaagtcgttggagtatatgggtctttccactgtgctcagattcaagtaaaactggctaatccttttcgaataggacaggcacatacagtgagggtaggtgaaatatagctgtaacaggctaatttgtcccaatccaattctaagctgttgatatgtaaaatatacatgctatacttttctttaaacagtggtttatggctcatgcagctggtcactgtacactagcggctagagtgggatgaggaagaaacagaaacatggctcaagatccatgagataaaacgttcacttgaaaaaagaattccttaatcaatgaataaaaacatattcagattaatattttctaaaaatgaaatgcataagggttaagggattgtggatggtattattaaggaagacctttctaaatttggggggactgacttttaaacattatttgttccctaatatcagctgattttgaagtgctccatgatgccaatgcaggtggatggggagccttgggcccaagggccctgcactgtcaccataactcacaagacacatgcaatgatgttatatttctctggagaacaaacagatgatgacatctctagtacttcggatcaagaagatataaaggcgactgaatagatggatgagggagtgaaaactttgcatagaatcctcacgcaagtagatacatgttcatccaaaagtattaatagaaattctctatcagctattcagtcttaatttcactagtagtataatgggtatacatttttgtaaatagcatccccaaaccagccagccttcagttatttacaaatgtttgttcttttttcagcaaaatacttcaaatgaatagtattaacttacaaaaagtcacaaaaacttacatgagagtgaaaatttgttatgactgttttgagagtgggactcactctgaagtatgtgctgtctcatgtcttatttttgaaccatgcatatgatggacacacaatggatggacacattatatctccaacaaggtgtgggtggaaagatcaaattaacctgcttttttgaaaggaaatgattactgtcaaaccagcatggttaattgtgagcatcctcctgcagcatgccccttaagattttctacaacccaaaccaagtgtatgtattgatttctaggaacccccaaaaggagaatagtaaaaaaagatcatacttaaaatttgtattacaatttttattttaggaacttattcagacacgtaaatgttgtttaattctgtaggtaaccatttgagctgcaattcaggatcttttttataacaccagtgtagccaaaagagaaacagataagtgaattggtaagaaataagattcagagcacttgggattgtaagttataggttctgagctgaactgtttatcagccgctctttttattaaaagacagtgtcaacacttcaaaaaacgtgcttaaaggagacaacggtgagattaattgcttagaaaaagctcaaggctgactgataagttttaaaaatttggtggtcttgtagtattttgaaatacagtagtcttttaacagaatttccccttagggaggtaagtggacagaaatctttgctaaaatgtttatatcatatttattttaaaatgagagagatatatttttaaattatttattatttaccttgtggtatggtacctgtgtttagtgtttacgttctgtagctttatttaataagttaaattgatcacataaattctgctagtcacaatcagatagaaatttagtctattaattaaaattctaatttaattctcctgacagaaatctagatattcttattcttcacaaatattcctcattgtattgaaaaatgaaggagggcatgaaaagcactagggaactacttttggataactgaaagctttgtttcattgttttatttgcccctcaattgccacaaacttactgaagggctagtttcatggttcccattagagggtgcttgttcgctgctgttgaccagcccaagggtcgtgacccacaggtcggctgacccagagggcatccagcctggtgtttttctgacacatggcccaggctttgtggtctttcatgacattaatctctgaaagatcagaatgtatcccccaaaataccattagctatctttgagggtctattatgaatctgtcatccatgaattgccataaacctaagtttgcctcacctcaggcccagaccatgttttcaaagagcaacttagtaatgtatacagtagtcagtacattttatgaaatactctattttgctaaattaacctcttgcagatctcctcaggtgatcttaaattctagtcttgagaaactttgtgagcagatctgttttcagcttctttatatacctttcatggtaagtaaccatggcagtgaggatggcagagttttgttttttttttttttaatgggccaatcatgttctgagtattatgaagtttatcctttcattcatgatcaaaattgttaaagacatcacattttataaatacactgttaaatccactttgctgtaggttatagtttacctgttatataattcgtagtgctaattgtagtagaagcaaatcaatttaggatgttggaacgaaaataatcacaataactaatacagctttttaattgtgaaaactacaattaaaaattataattttaataccaaccataatattacactgtatttagaacaggcttatgtaaaatgccctcatttatctaaataagttgattttttggttattgtaatctagtaaggtttttgcatcactactggtctgtcatgaagtttttctgctggcttattcacttatttagacttcatttagggaagctatttcagaataccatctcataaaatgtatcattatcttgtttttgcaaaattcacttactttttgggcacatttacccagcatttcaaataagtgtataggcatgtgccttgtttaagtacaatttataagacttcatgtttgcaagttacatattagggtagtgattgtttatattaccagggattctacactttaccaaaaaaaattgccataagattttcctgttccattttaaattgtcttgatatttaaaaaaataacttctacattctcaggaagaaatacatgaagtaaatcatatctccatgtctgtttccagatttctctaatctttttactatcccaatacattcctaattcctataaacgtagtggcttaaatactgaatacctggcagctcttaaagatcccttaggcagatgatgataattttcagtgtttcgtcatgtttaatagaaatcaaactgacttgtgttttaaaatacaagttgtctgctagtaaagttacatgatttaggtgtgttttaggttttctgcaacaattagctgtgaacccctaatgtagctaagtttatacaaattttataatcaaaattatttatttttatttttttagagtatgtcaaaaacatatagtgtttgctttgtgaaatacatttgcttagagttataaaatatactgtgactcagaaattgtaaagtcagtttgcgttgtaaaaatgaatactaccagcatgtcaaaagaaaaataatttacatttgtaatataaagtaaaattgtatttaatatatttattgaattttaaatttgcactaacttgaaaactttaaaggttatactaatttaatgattaatgtggacccaaatacataatttggccaaaaaagtcattagaatgggtaatggttttgtgtggttttccttcaaaatgataatattgaagcaagaaccagcattttatattgataatttttttaatatttctacccagttgaggacagtggaatataagtagatatatttaaaatatctagatatttaaaaagaaagaaaaggttgtttatcccaatctgaattcattctcagcaacaagacagaaaaggtggtttgggttttgcttttaaacagtgtccccctgtctttttcaatttttcccttgaagcctttctcttgttcttcagagtacgcgctgcaggctatctgcagcatcagaatgcctgggcaggctgttgaaagtatggattcctgagcccaacccttaacttaatgattccctgtctctggagatgcaacatagaaatctctgtttttattaacaagcgcctcaggcgattcttaagcatactgaaatttgaaagcttctggtctgaacctcatgtattcacctagggcttttgctaggtgggataccatgccgaaaaattgaattaattgtatgttcttaaaattgtttttcttctactccgctgtcctcttccctcaaaatcacttttctaaaagaactctatgaaaaacttatttgtatcatacccaaattgatatatttgtctgaactctgttacataaaaattggtatgattcatatgtggaatcagtttttggactgtgacccatgcagtgttgggggacaaggagttgcttcaggagttagtgcagtgcgcctccaaggggcagtgagccatggaggcgcctgccttctcactgcagtcaatgcagccacacttgtgtatactgagtgctgcttcagatctcagtagataaaataattccacatttaaaatgattctgctattttttataaagggtttgaaagccactactataatgactttgtcacctaattgattttctactaatttttacatattcagaaacttcgtgtttttttggtggacagaatattttggaggtctccgtcgctgtttagaatgtggccacttggctgtttcacagtttttaaagctattttattgaatagtaaagcagtgaacttagcctttgttctttgtgtttctaatttaagcatatagtctatttaatttttgatatgtaaatacacatcaatacatatatatttacccatgtggccctgtgtagtcagtgcatgaggcttgcatagcccagaaaggtacattccagggttctggggaaagaattttaaaatgccatcctctaatacagacgtttataaaacttaaatgaaatgattgggcttaaccatatgcaagaaagtctgcagaaaataaatcacctagaaactataaatagaaatgtgctgctgaggctgggcacggtggctcacacctgtaatcccagcacttggggggctaagggaggcgtatcacctgaggtcaggagtttgagacaagcctggtcaacatggtgaaacgccgtctctactaaaaatacaaaaaaaattagccaggtacattggcacatgcctttaatcccagctaatcaggaggctgaggcacgagaattgctcgaacccaggcggcagagcttgcagtgagcggagatcacatgactgcactccagcctgggcaacagagcaagactccatctcaaaaaaaaaaaggccgggcgtggtggctcacgcctgtaatcccagcactttgggaggctgaggcaggtggatcacgaggtcaggagatcgagactatcctggctaacacggtgacaccccgcctctactaaaaatccaaaaatttagccgggcatggtggcgggcacctgtagtcccagctactcgggaggctgaggcaggagaatggcgtgaacccgggaggcagagcttgcagggaggcggagcttgcagcgagccgagatagtgccactgcagtggggcctgggccaaagagtgagactccatctcaaaaaaaaaaaaaaagaaagaaatgtgttgctggtatcagatatcagaccaagaacacttcagtctctctaaggatgccctgagctacctcactgttaaaggacgacatcaacacagaatgcactaaacaggaaataagctgtaatctagagaatttccattatgtgttactttttggtgactaacatggaatgttgaaaaggaagagctggaaagctcagttgttttccttgttcctctgacattgtccaggcaagagggcatcctgatcagatgagtagatttggctgagaaaaaccctagagtaaggcaggcactttgtggaggtggatgatgatggctcataaaaacgtttgttctcagtccagttcagggctctgccagcagtctttcagatctgaactgcttaaacaaaccctacagataaattggcactctgatttgtaattctgtttgtacaagtttagagcagcctagctcgagtcctcaaccccagtcctcttagaagtgaactgattgcactggatccctaaacccacaatgttgaggacacatgtgatgactccacttgctcagccagctggcctcttgcactttcccctgcccaccacttgtaactaccacttaattatcttgtgttaattgcttttgttgtgttgggtctgtatttttgtggtcagtgcctgcaggcagaaatgtgaaagcatttggtatgttgaagatacttgcttcttttttaataaaattaaaagtgcagcacgtaagtatgatactgtgtagttttttgacacaaccatgagatacaataagcagctttgacttagtgtcccaaaaagtggttcttggtctacagcagggcaaacatatatgtggcaagttctgatcacatacttttagacagaaagaataaaaaattcatattgcatggcttttgtagcctaagagcacagaatcatacacgtgtgttaggagaaacattcattctcacgcatataaactggctcctggcagagtagagcagtaagtgggatcaaaggtgaattcaccttattttcagttggtagagtatggaaaaatgtatcacttatttgaaatacctgaatggaaacccagcctctactactgtaacttaacacttgttcttcctgagcctcaaattttctttctctgtaagaatgggaattaatgcccacctacgggttgcaagtgcttacaggagctgggcaagcaacgaaggtaagagttgtagagacttcggtaaactggagcacatgattcctgggaagcaggcctagtgtaaacaatttatttttctagaaaagacagaagtttagagtatatgaaatctaatttttaagtattggttggcaactaattgactatcgtctaccataaggttatatgataattattagggcaggagagtgaatgcatcttaatatgcatggcagaactgtgtgtttccttccatctggattttcataaagctttctgatttatcagtaacgatctgaaaaatgtactgtggcatgtaacatcttttattcattttattaggcattagaggaagaatattctgtagtcctgctttattctgccatctttacctggaaatccatttttataaaatttttgtaataaaaattcacttgatcacttgcctgctttcttttaaacagtgccaagcgtaatgccccttgataatttacatatatgtgaacgtggctgtgatagctgctgatgttcacacataggccatcttacatgtaatgatccatgtttggacttaaacagcttcacacatttattgtacagttaggtgtcacatgcttttactttttattttataatctgtatttctgtgaggtagacattattggctccatgttatatacattgatagcccggagctagagattgaacccaggccatcctccccactgcctttcatcatcaacacaaccaccaccaacagtattttaaaagtgttaaatattggcagacgtgtcattgttctgagcactaggactagggcttatgcggctgtctgaggaattccctgtacaaggaaacatcatataccaaaaagttactcatggaaggagtttggagatgatgagctaaaagtattacacatggactattgtaaaagaaaaaaaagcaggcacaataaaattttagaatgtacttaagaagcaattcgtgacttgggaaaccccaaacccaatgaggatttagtgtttcaatgacacaacatcagaggcaagtattcatagagtgcatacagaagcaaaattaagaaatgatttgattggttgccttttttggcttactttcttggaaagtccccagtctcatgatcatgttagttggctgcttatgattggctgaggttaagttttgtatctaacataagcatttaccaaaaatgacccaagttaagtttcatttatgtttacagtttaagtaggttagggctatttttaaggcctagttggtttgtttgctcaggaatgtttcaagcctagtttccattttaattttgctttgacagttccccacttttagtcaccccgtccgcaagctgagagtgtgaccaaatggcatagcattactctcagttaccactattgacatagtctaggaagaagagtcagatgtttatcaatagctgccctagggctcagagtcaccctcgggaatgacatagtccatgctggtttcctccagttgtctgatccttacggcaatcttttgacatatgagtgactactggaaagcacttaaacatccttgaaaggaccagcctctgtgaataacacctgtaatctcagaactttggaggccagagtaggggaattgcttgagcaggagttcaagaccagctagacaatgtaacaagaccccatgtctacaaaaaaaaaaaaatttttttttaattagctgggcagggctgggtatggaggcttacacctgtaatcccagaattgtgggaggccaaggcaggtggattgctagagctcaggagttcgagaccaacctaagcaacatattgaaaccccatctctaccaaaaatacaaaaaattagccgggcgtggtggcacacacctctggtcccagctgctcgggaggctgatggaggagggtcacttgagcctgagaggcagaggttgcagtgagccgagattgcgccacagcactccatcctgggtgacagactgagacctcatctcaaaaaaatacaaattagctgggtagtgctcactacagcagcacatatactaaaattggaacaatacagagaaggttagcatggcccctgaacaaggatgacatgcaaattcatgaaatgttccatatttttacatataaaagcaagctgaatcctgatcaccttgagtacatgtcatcagggacctcctgaggctgtgtcccgtgcccatgcatgtccttaatcttggcaaaataaactttctaaattggaaaaaaaaaaattagctgagtgtggtgatgcacacctgtagtcccagctactcaggagacggaggtgggaggatcacttttgtccaggagttccaggctacagtgaggtagcattgcaccactgtactcctgcctgggtcaaagagcacgacactgtcgctcaaaaataaattttaaaaattattgagaaaatacaatgcactgtgttgggtaagccattgtgtatgggtacccactgtgtatgggtaaacacaataactacaagaagaataatagcaaaggattgaaaaccctgagtaaagattcccaggagccaagatttaaccaactgaataaatcaagggaggcagtgctaatgagatgaaaaccttgtgttctttaggaacttttacattttgggcaacaatatcaaatataacaaacacttaatgttttgttaacataaaaacaccgtaagcttctccctgctgagcagctgaagtgtcagtaactcctactttggggtactgctgaggtgaaattattcatctcatattgtactgcttgaagaaaattcgtaagtatcactaaaacttttttcaagagttgctgaaatactaacaagcaattttttcaattcagaggctcccagctgaggaaaaagagctcttacaaaagagtgaaatctgtaacccttgtatgattgagtctggagatcactcaggaggctcatttctgagggctcactttatgtacaagtgacctgaggttcagaatttgactaacatttagagtcatctggtcattttaggtaggacatagccaaaacattctgatcatttaggtggaaaaacctttatatatttgtcatacaagatgaacaatccggctgggcgtggtggctcatgcctgtaatcccagcactttgggaggccaaggcgagtggatcacctgaggttgtgagtgtgagaccagcctggccaacatggtgaaaccccatctctactaaaaatacaaaaaaattagctgggcatggtggcagttgcctgtaatcccagctacttgggaggctgaagcaggagaaatcgcttgaatttgggaggcagaggtttcagtgagccgagatcatgccattgcactccaagctgggcaacaagagcaaaactccatctcacaaaaaaaaaaaaaaaaaaagatgaacgatccacaagttgattagggcctttgggagataatcaggattaaataaggtggtcagggtgggcctcccattatcaggctggtgaaaggagccatgaccttcaaactgatactaaatcttgaccatgatttaggtaatggcaatggactctggaccaataaagccctcagacaactggacggagggggagatcagacaaataagaacctattatttctaaataagtgagacattatgtaaatgggaacatataaacagagccgtatggtctggagtcaagtaacatacatattagcagggcatgtgatcatttataaaacaattttatataaagtattccccatagaaacccaatggaggaggcagagtagatataatttttctaaatgagtacattgcgattcagaaaggctgatgacatgccagggttgcacggagctgggatactgatccagtcttgtgactccaaaatttagtggagtttgttgttcatttttttcccccactaagttatgccacctttttcctaggtcaggggttcctagcctttattatatcataagccagcctctataagaagttggctatagctacagacacttcctccctccctctgaccctagcagtttggcgcatacagcagaattttgcagccaacttggagggcctccgagactccaattaagaacctctgaaccaaagataccagtcctagctgaggtatctcagacatatttagtataaactggcaatgagcttgttctgtctggttatcttctgtctgtggccattttctattctgattcatccacaagcccacagagaagtcagtaacacacaggttcagaaaagccagtggtggagaaatgtttccgggagaaaaaacagtggcactagggttgcgcctctagggaggtgccattcgacatgttctgggaacaacatgctggacaagctggcaagaagaaaagactgatgcgtggccaggcgcggttgctcatgcctgtaatcacagcactttgggaggccgaggcgagtggatcacctgaggtcaggagttcaagaccagcctggccaacatggtgaaaccccgtctctactaaaaatacaaaaaaattagctgggtgtggtggcgggtgcctgttgtcccagctacttgggaggctgaggcagtagaattgcttgaactcgggaggaggaggtttcagtgagccaagatcatgccattgcactccagcctgggcaacaagagcaaaactccatctcaaaaaaaaaaacagatgaacaatccagtattattgagagaaaggtgtaaagtgaatcccattatccgccagttgggggtgacatgaatgccatagctattctttgtcatatctgcatttgcacattgccacgttgaatggttatgctttaaaattggagagttggaaccaaaaacagttcactgtacttgataaagtaactcatgtatgtcatcaacaactaaggatgactgtttcctcttcaaatatgccccgagtatttatccaataaacaaaactagttattttctatagtggtactatagagtcattccatttgcttctagagtttccagtgaaccaatgcctaatttcagtgagctctctatgatatagttaagggtatcatggtcatgttctggtattatatctgcatcattatatagagtagttcagtctccataatctatatcaaaccaaagactttgattacagagggagtctggaccactgctgagattagtcccagtttttcttttctctctctctcttttttttttttttttttttttgagacagagtctcaatctgttgcccaggctggagttaagtggaacaaacatggctcactgtaggctctccctccagggcttaagtgatcctcccactgcagcctcccaagtagctgggactacaggcgtgcatcaccatgcctggctaatttttgtatttttgcttagtagagacagggtttcaccattttgcccaggctggtcttgaactcctgggctcaagcaatctgcctgccttggcctcccaaagtgttgggattacagacatgagccagagcacccagccccactgacggatttttctctaggcatagagaaaaattaccagtgataaaatcagtagtagttgtaggccattcctttgcttctattgcttcttcccagtgctgtttgtcgatctgagctacctaccaagggaaggatactaaaccctttcatgaacgcagtttcctgaattactcactcaagcatgtgtaggagcaggttctaatattagttgtgattcttcccattcatctagataactatgtatctagcaatgcattggttaatgctgtagtttgcatgtattcccttaaatttcatgtatttgaaacttaatccccaaattcacaagttgattagagatacggcctttgggaggtaatcaggattaaataaggtggtcagggtgggcctcccattatcaggctggtgaaaggagccatgaccttcaaactgatactaaatcttgaccatgatttaggtaatggcaatggactctgggccaatgaaaccctcagacaactggagggagggggagaaaagacaagtaagaacctattatttctaaataagtgagacattatgtaaatgggaacacataaacagagccgtatggtctggagtcaagtaacatacatattagcagggcatatgatcatttataaaataattttatataaagtattccccatagaaacccaattgaggaggcagagtagatataatttttctaaatgagtacattgcgattcagaaaggctgatgacatgccaggattgcacagagctaggatactgatccagtcttgtgactccaaaatttagtggagtttgttgttcctttattttttctcccactaagttatgccatctttttcctagatcaggggttcctagcttttattgtatcataagccaacctctataagaagttggctatagttacagacacttcctccctccctctgaccctagcagtttggcgcatacagcagaattttgcagccaacttggagggcctccgagactccaattaagaacctctgaaccaaagataccagtcctagctgaggtatctcagacatatttagtataaactggcaatgagcttgttctgtctggttatcttcctctgtctctggccattttctattctgattcatccacaagcccacagagaagtcagtaacacacaggttcagaaaagctagtggtggagaatgctcgctttggcagcacatatacagaaaagctagtggtagagaaacgtttcttggagaaaaaaagtggcatttaggctgcacctctaaagagatgccattctgacatgttctgggaacaacatgttggcaagctggcaagaagaaaagactcatgcatggccaggtgcggttgctcacgcctgtaatcccagcactttgggaggctaaagtgggctgatcacctgaggtcaggagtttaagactagcctggccaacatgacaaaaccctgtctctattaaaaacacaaaaattagccgggtatggtggcggacacctgcagtcccagctactcaggaggctgaggcaggagaatcccttgaacccgggaggcggacgttgcagtgaactgagatcgcaccattgcattccagcctgggtgacaagagcaaaactccatctcaaaaaaaaaaaaaaaaaaaaaaaaaagaacctaaagcatgccataaatctgtgaactatgaactttagggtgccatgtacaaaaatggcattttaagattatcctgggagcagtgtggaagatgagttgtaagggggaaggattagaaagaggaaagttattcgatagaagtagagcagaaatgagaacattcatggaggaagaactgacaggctaagatgtaggatacctagaggaaaggggtaagggatctctcaagattttcagccttggaagaacgaatgtgttcaataactatttattgtgtacactctattgatgatagaagtgtggaggtgcagggcgtcaaggccaaagccaagttctgagtcaaccagtcaagttgcaaggagctactttaagatttagagagtttattacttacgtagacagcaaaaagaataaatgtgccagcttcctgtgatctttgtcctacataccacgaagtgtatgacaccaaatcaaagacccacatgactgcagtgtgagttgtgggataccccgttgccgaagtgctaatcctagaagctctatcctgaggaagccgggacagaaagcctccacgtcaccagaacccccaagatatgagaaactgtctcatgacagcttcccaggagagataaggaggtgaacagaagatctcctcacaatggctatgtacacaggcttcccagcctcccacatccaggaagaccatgaggcgttctgccaagactctgcctaagtggatacatgcaaggtcaccatgatgcggtggtggagctgttccccaacacaggggagagctggttttgaggaacaagaaataaacatggttttaaatacatagactgtaaagttacattcagacattcacatggaattgaccggggcttttgttttcatcaactttgtcttggctgttacacagcagtggataaccagagcacagctgttgattgatcacccaacacccacttcccttctctttccctgcagcagactgccacgtcggtccaaatgacagccaagtactcagagaaggtgacccaccccaactcaggagtaaccaacatgcgaatcccattctctttgcagttggaggtggacgtgcaagttaactctagccaatgagatgtgagggggagatctgcagggtgcctccaggaaaggcttcctggctcttaaaaagacagagacaatgtcataactgggtgcaatgcctgcaacattgcagccatcttctgaccatgagggactcagtgctgaggacaaagccaacaggccaagaaaggtggtgtagaaagaaggaaggagcccttgatgacaatgttgagacaatgttgagtcaaccaaccccacagctgccctagctgggactactggatatgtgagatgaaatttttctttattcatttatttatttatttattttgagacagggttttactccatcacccaggttggggagcagcgatcatagctcacttcagccttgaagtcctcggctcaagtgatcctcccacctcagcctcccaagtaactggggctacaggaacgctccaccacacccagcccttatttttttcagttgagttttctgctcattgctaccaaaagcagcatcctaactgatacttatgtaaagtcctgtacattaccaggaacataggaagttgaaataaatgtcagctattacatgatgatgatgaagaagaaagaagaggaagaggaagaggaagaggaagaagaagaagaaagaagaggaagaagaagaagaagaagaagaacaagaagaagaagaagaagaagaagaagaagaagaagaagaagaagaagaagaagaaggagaaggagaagaagaagaaaaaaaaaagtgggtggattcttgaagggcaaaatgctaaggtgaaaatagcagagatcctggaccttggagaacactcacctttaggggagactggacagaggatgaaatgacaaataatcagtaaaggaaagggaaatgaagtttaatgcaagcaaagggaatgagaataatacacaaggaatactagttccatcacgtgcaatgccacagagaggactgtttccctttctccctttgggggagacctcaaggggaaccaaatttgattcacaaaggctcacctttatgtaccagtggatgtcttttttttttttttttttttttgagatggagtctcgctctgtcacccaggctggagtgcggtggggcgatctcggctcactgcaacctccgcctcctgggttgaagcgattctcctgcctcagcctcccgagtagcttggattacaggtgcatgccaccactcccggctacgttttgtatttttagtagagaccaggtttcaccatgttggccagggtggtcttgaactcctgacctcaagtgatctgccctcctcggcctcccaaaatgctgggattacaggcatgagccaccacaccctgcaccagttgatgtcttttaaggtgtctttctaggccagtgattctcaaagtgcagttcccagaccagcagcctcaacaatacctgagaacttgctagaaatgtgaatttgtgaattttcgagctccaccttaaacctgttgaatcagaaactctgggagtggagcttgagaatctggttttttttttagttattttatatatatggagagtgagagtgaggctggtggccaggcgcggtggctcatgcctgtaatcccagcactttgggagggcaaggcgggtggatcacgaggtcaggagatcgagaccatcctggctaacacagtgaaaccccgtctctactaaaaatacaaaaaattagccgggcgtggtggtgggcgcctgtagtcccagctactggggaggctgaggcaggagaatggcatgaacccgggaggcggagcttgcagtgagcggagatggcgccactgcactccagcctgggtgacagagtgagactcagtctcaaaaaaaaggaaaaaagaaaaaagagagtgaggctggaatgcagctcactgcagactcaacctcctggtgccagactaaatttctgttcttgttgctgaaacaaggtctccctctgtcgcccaggctggagtgcagtggtgcgatttcagctcactgcagactcgacctcccaggctcaagcaactctgccaccacggtggtggcatgggactacagatgcacatcaccacaccggctgatttttgtattttttttagacacaggatctcgccatgttgcccaggctggtctcaaactgttgagctccagttatccacccacctcagtctcccaaattgctgagattacaggcgtgagccaccatgcctggcctattttttctttaggactctgggaacggttatatttagcgtgtgtgtgtgtgtgtgtgtgtttggagacagagtctcgctctgttgcccaggctggagtgcagtggtacagtcaaagctcactgcaacctccacctcctgggttcaagcaattctcatgtctcggcctcccgagtagctaggattacaagtgcccactaccatgcccagctaatttttgtgtttttagtagagacggggtttcaccatttggccaggctggtcttgaattcctggcctcatgtgatccacccacttcagcctcccaaagagctgggattccaggcatgagccaccatgcccaacctagcatcgggttttaaattttactttttctcctctgttataaattcctctggctgaccccagacatacagcacatctctcatgcacgctgggcttgtgttcacgatgtgcattgacacattagactaacatctctggtgtgtctcctgtgtcccaggcattgttctgagtatttaggaaacagcaacgaacagaagagatgaaactcctgcactcatggagctcactttctaatgggaagtgaaagagtaggatgaagggaactgtgcccttccttacatcaccccacacttaaaatagaacctaaaaccacacacggggttcttcaaataccaggcacactgctgccccagggccttctctctctcctagagctttgcatggtctaaccctctccccacttcattctggacactgagcaaatgttatcccatcagagagggctttcctgaatgccttagctagaccagcacacacatgtatctatcatgccatgcccctaactggctttgttttctttatggcccttttccctagactaaaatgttgtctatttcctctactagaatgtaggcaccacggaggcaggaatttgggtttcttttctcactgctgtctccccaatctagggacaacgcctggcacccagtaggcactcaagaagtatttactgaacgaatcagtcaccccttcactgatgtcagtttggcaacagtagtactgacagaggggatcgtggctggagttccaggcggggaaccacagaggcatacttgaggggtaggggaaacgaaaaattacctggaggagcagctgtcctaaatatagcagcagcagatgacccgtgaccagggtcactgtccgaccacaccagattctgcaagttggcagggttttcattgtatatatgaaatatatatacaattgtatatatatgaaataagatatatatacaattgtatatatgaaatatataaattgtatatatgaaatatataaattgtatatatgaaatatatatacaattgtatatatgaaatatatatacaattgtatatatgaaatatatatacaattgtatatatgaaatatatatacaattgtatatatgaaatatatatacaattgtatatatgaaatatatatacaattgtatatatgaaatatatacaattgtatatatgaaatatgtacaacttcatatatatttgtatatgtatttgtatatgtatatgtatatgcatttgtatatgtatatgtatatatatatttttatatataatatatgtatatatatttatatataatatatgtatatatatatttatatatatttatatataatatatgtatatatatatttatatatattatatatatatataaaaaagacaactatggaatagaatttcagcatctatgttttatttttatttttattatattttattttttgagacagagttgcattcttttggccaggctggagtggagtggcacgatgtcagctcactgcaacctccgcccccagttcaagtgattctcctgccccagcctcccgagtagctgggattataggtgccaaccaccacacctggctaatttttgtatttttagtagagacagggttttgcaatattggccaggttggtcttgaactcctgacctcaggtgatccacccacctcaggtgatccacctgcctcagccttccaaagtgttgagattacaggcatgagctcccacacccagccttgttttaaccttcttttagtctccgccttgacataaggccaggagtggtggcttctagtactctctccttttccctgtcatagagactacggattcctaaaagtggacagcagtgccctgctgaacccagttactggttactggctgccctccagacaggggccagatgaaaaatcaatgtgtgccattgtcagaatatgttttaaagaaatctgacttgaggcatattaaacagttggacataaaggggtagtgtctcattatgagccattaggaataggcaagaaaaagcaaaacagaaactgctccacctaccaggtagtgctcctgttcatagaacaaagtgctgctcaccgaatagtacaaagtcatgcaacaactgcatccagtacataaatgcagaagctttttaaatttacaccttgtataatttgttaaggttacattgctgggctgggcaccatggctcatgcctgtaatctcagcactttgggaggctgaggtgggtggatcacttgagtccaagaattcaagacagcctggccaacatggtgaaaccatgtctctaccaaaaaaatacaaaaattagctgggtgtggtggcaggcgcctgtagtcccagctacttgggaggctgaggcaggagaatcacttgaacccaggaggcagaggttgctgtgagccgagatcgcaccactgcactccagcctgggcgattctgtctcaaacgaacaaacaaacaaaaagattacattgctggcatacatttcttttctttttagagattgggtctcacgatgtcgccctgggctggactcaaacttgtggtctcaaagcagtcttcccacctcagcctccaagtagtcggaaccaggcctagctttgctggcaactaatgatagtttgtacttcctaaatcattagtaaatttcaatttctatttttaaaaataattatccaaaaaggaaacacagcacaaattgccttcagccttgtacaaataaagagataatcagtgagtagtttataaagtgggaatgataagtttctgagcttttttttaaaaaaaggaagtcatttctgttaaagaagaattgatttagttgggcactttaagaacttagtttctgtgctttatacaggtgacactaactctgcgcgccatttcaagggttgtgcatctggtggtaccagtaacatcaaagggtgattaataatccaatattattaatgaatacatggatattggtattagaggtcaaatactatctttgtctgtgaatttttttatgtagagaagggtgatgtaaaattacaaactgagtggttttttttttcatatgaacattcccctatcctcaagagtaggacaatagtaaattcacagaacaattgtaaattaacataggtgctggccaatctgaaaccagtatattaagtgttcaaggggaatcaggctgggctcagtggctcatgcctgtaatcccagcactttgggaggccgaggcaggcggatcccgaggtcaggagatcgagaccatcctggccaacatggtgaaaccccgtctctactaaaaatacgaaaattagctgggtgtggtggcgtgtgcctgtagtcccagctacacgggaggctgaggcagaagaatcacttgaacccaggaggcagaggttgcagtgagccgagattgcgctattgcactccagcctgagtgacaagagtgagactctgactcaaaaaaaagaaaaaaaaaaaagtgttcaaggagaatgaagagactgagggagttgggcagattttattttttcaaagctggccacagcactatttgccatcctatgttaacttgctaaaaagcccaatagttctcacattgtgtgcccacagaacactgactgacattgctttttaagggaattagcattaatgtagcacttcctatttattactgtctttaagctgcctagactatgattattataacaaccaccactagcattgagcatttactgtgtcaactgcttactgtgtctcgtttagttgtgtcataacactaagatgtcattacactcattctgttggtgaggaaatagagaaatacagtaacttgccaaggtcacagaaatggtgaagctgggcttttcctcacacaccacactgctttgtcccaatattacaatgttgatctgtctccaattcacaggaaaataatttaaaatagccaatagaatgctcttaagttggaaacattcttctatccctttttttgacctttcgcatttctttttttttttttttttgactctgagagagtatttatctatgcaccctggaagccagcctctaaatttaaatatccagcatgggaccttggccctcctggccgtgggtgggtgtaggaatgggtcctagagcccttccctgagagtggaacccagagcctggaagtgggatgcccctgagccagcagctgccaatagccacaaaaggggagaaggagatgggagccagacactcatcccaatcccagagactccaaggggaagggaagatgctttgggcctcacagccaggctgagggttggccaagctggaggtacacatatgtggaagaaatggaggcccagtgccatgggcagagactataccctaggtgcccgccccagtgccagccaacccaagacaggagaaaggggttggcagttttgcatctgagagatacaagtggtgcctggccctcctgtgaggtgaggcagtatggggaaaggcacaagcactgcagtctaagggcttatggaagggggagtctctgagccttttgcatgggtgcatgcccacccacccccagctcttcagaggctgatgtggaaggcatcctgcagccactggtcacaaacactgtgcatctggggcacagtgaggagtggcgggtcggggggcaggctggcattgggaggctcatcatcatcagacaggccagcatcaggtgggtaggaactgtctaaatgcagggaggatagcaagtcctggatgagctcatgacctttcacatttctagagagcaagtgccagcagatgacagaacgaatgaacaagtagcaaatatacattcatggaaaaggtcagagcagctggttttgcttgattcactcatttgattgtgggtgtggatgtggtgtgtgtgctttggggcaggcaatgtggcagctgctcctagttgtgaatatattgcatgcctataacactgtttccatgtttgctgagttgttctttgtttctatgatgaaattaaatataccttttcatgggactagacaaagagcatcaatcattctgtggcagcagcttttcatgaatcccctaaaactgtgcaaagctgcgttctatgtgtatgcatgtgttgttccggtgagggagttctgaagtcaatgctatagttagattaccaaagacgtctgtgattccagaaggattaaaaaccactgaccatctatcattctacctatctgccatctctccatcatgtttataacatcatttatgcatgcatttatctatttatccactaagagacatatttctttccagatggtagcatttgagatgatttatttgtaattttctgtcctgctttactccttcataatgaccattgtattagtccgttttcacactgctataaagagctgcccgagagtgggtaattaataaaggaaagaggtttaattgactcacagttcagcatggctggggaggcctcaggaaagttacaattatgccagaagtcaaagggaaagcaaggcatctttttcacaaggcagcaggaaggagaggtgctgagccaagcaggaagagccctttacaaaaccatcagatcttgtgaaaactcactcactatcacgagaacagcatgggggaaccactcccattatttagttacctccacctgctctctcccttgacaagcagggattacgggcattacaactcaagatgagatgtgggtggggacacaaagcctacccatatcaaccatgtatcattcttagaaaaataatgaagtgattaagagaaaaggacagctgatctgggtgccccaccacgtgtccaacttatctttatacctccattgatgggaaactcaaccagctctctaggtggcctagtctgtctgtttacctcaaagtattaacatttcttccacatgctgaattcatggctaggcaatgaacaaatcaatgaagaaggctgggcacggtggctcacgcctgtaatctcagcactttgggaggccaaggggcagatcacttgaggccaggagttcgagactagcctgaccaacatggtgaaaccccatctctattaaaaatacaaaaaatagctgggcgtggtggtacatgcctgtaatctcagctactcaggaggctgaggtaggagaatcacttgagcccaggaggcggaggttgcagtgagccaaaatcaggccactgcactccagcctgggtgatagagctagagtctcagaaaataaataaataaacaaacaaatcgatgaagctccagggggcagataaaacagaagtgagtcttggggtggaagacagggagaggcatctgtggctggatccctagaagccatctgagaacacctgcctgctttgccatcccagatcagggacagggtgccaaggacagcaaacagggctcagcacagcctgggcatgcaaatggcttgtctgtggttcacggaacaagctcaggaagctggcagggaggaaggggatatagtgaggcagaaaggagaagaacaaagttcaaatacacaagggaagggagtaggtggggctcacctaatgtcaacagcccttgggtgcaggaactctgtggagaatgtgaccccaagaagggagtggtggcaatgccaacatgccttggttaagagaaaaggccctttggctataatgctgtgtcctagttcccaaggcagcccccaactagatttccctcaaaatgcaggtgtgtgtatgggtatgtagagaaggtagagtaatcacatgcaccatattttaaatgtcgacctatttttacctcaaaaatttcatctggtcctcatggaacctttaatgcaggcaaagttaagactcagaaaggagatgtgcctggaataaggacatacagctcaataaggcagcagaggcatcagcaaaaggacccattttgtgtgtgcatttattccaaattgccccctttaaaataggctttttaaatgtatcatttccccttcactctttgatttgcttttttagagtcttcctgtattttatgtattggaattgatctacaataaaatacaggtagactgcaactccaaggtcaataacggttggagatccttcggttattcatgatgctatggcatttcaagactgcctgggaactgatgagaaaacagatgtaaaacctatgagcaagtccaaacttagcccatgggtcaccccagcagaccacaaatgacttaaaaaccacacatgcgtgcacacacacacacacacgcactcccagcttgcctttagtaaggagtcacaaattaccatcctgaactttttattggaaaaaagtgtccccggacagttgaagagtcatctctgaatagaaagacaagtctatcactgacatactgagtatttttatggttacagtgacagtgaggaagaaaaaactacaagaggggttggagatgagcgagaacaaaactcaggacagtaaacaaaggggacttcacacaggtgagaagaaactcaggaggctcccatgaagagtagtgtgttttgttccaacaggctggtcgagaagggcttactcaaggtgtgcagatcccaccgcctctgttctgacaccacctggtgtaccgcaccacaattctaacaacgaccagcagagttagatcagatgccaccagcgaagggacatagtccccaacagggctgccctcacctcagacaccagccccatgtggggatcccaggccatcagcgcttgtgaccaactgcctacaatcccaggagggtaccatgatcttcctcaggttcaatgattcactaaaaatcacagaactcaggactatacttatgattagttttattataaaggatacaaatcagctccacaagccaaggaagacacagggaaaggtctggaagggtcttgagcacagtgctcccatgccccctcttcgtggaattagggcacactgccctgccggcatagccacagcttcaccacccaggaagctatgctgagctttagtgtccagagtttttattagggtttcatgatgtactgattaaagcactggccagatgattaaactcagcctccagtcccccgccccataggtcaggctgactcaaagcctcaaacctctaatcacatggtcagtctgtctggtgaccagccccagctctgagtcatcccaccttttagcataagctcaggtgtgatcccatggcctcacaaataacaaagacactcctattaccctggaaatgtcaaggactgaaagtctccctcccaggaagcagggacaaaggccagttcaattctttagacaacctccaatccacacctcctggaactcctaccccaattgaaacaaggataaaatccactgaacatggagggcccattgctggcctgaactatttttgtttcttttttttttttaaagctttttattatagacattttcaaacatatacaacagtaaaatgaataatataatgaaccctcacacctccatccctagtaactgattatccgtgtgtggcttactctttgatcgatactctcctgctttcccctagcccccacagttagactgtcccgcagcaaagcccagacagacatcctatcggtctgagaattccttatcaaaagcttcccgaagaggaactctatatagggcaggactaagtgtgctggctataggtctgcagaaatctcaacccttgggagcccttgggtggggcctgggcaggtccctgggcagtagccgtctgtagtgggcggctcatctgctgacaacagtatgacgaacaaatagcattttgtacccgcactacaatgcaggagaacgccaaacaccgctttattgcattcaaaccttctaaggcacgtcagccagccctggccttgtctacagccatgattatctccttaaagagttaactctaaaaaaatattaagctcaagaaataacagctcaaatactcctaactaattaaaatcaatagtgagaggcagaatacggtaaaagataacatattagtattattgatcacagatcaatttcagagtacttaaaacaggaataatcagctaccacatcttgaaaaatacaaagacttgatcctaaccttttatttatcatgccacacggactgagacagtccccagtacctgggtctaggagagttattttatgtttgtgtttctgggaatttccgatacttcccagtgtatcagagtgttcccctcacacatgctagcaggcatctccccactaatggaatagcaagagtggtgaacagagcgatcctctactttctcatcatattctgcaaaatgagaagtcagatggatacaaaggttcctccaactctaggactccagggttgtgtggcggccctgcaaggctaggttatgtaaggtctcaccattgcaaacagaatggttcaagacagcaaggatgcactcctcaatttacaactccaaagcaccttgcacagagcttggctttggttacctacttgactctcttttaaacagagggtcttatgcttccctatcctgagctgcacatttgccagggaagtggcctcactgttgccctcatttctgcagaagagagccagagcaggagccatggatttatctctggcattctactcctccaagcccagctgtttcccaagtattaattggtttcagacaaggctttcgtttcagaaaatcaatgaagatgcttttgatcatcttcaaaagcagagaagaatcaccaaagaacttttcttccaagtagtaaaggaataaaacttctaaggaccacatatcacctattgcagggatgtctttcctacaaagattattgctctcccgaggaactgaaaatccttgttaggagatgacaccgatcaggtatgtacctgcatgtcaggtgtgtagctgtcaggaatatcaagtgttctgagcctgcctagagtgccctagagttccagcacgaggcctgagatgcattacattctcaaatatccatatgaaaaggtctggggtctctagttccccaatggtgacttcttttcatattataggaagcctgacaggagctctcctctaagcaaagcccagagttggactcatttcactataagaggctaaattcctcatactcacatcctgacaacattaggctataaggagcttggggaaaatccagccatccattcactcccgccccttagtggactgggttattttcaccacacagaaacactgcagggaaaatagccacttgtgtgaccctctttagctctttccctccctccctgatcaatgtgagcttatataattggcttaaatgaggaagtcagtagaaggggctagggccagccccaggctctgactcacgcaagggccagtgctgggtctgcagcctgtggccagggatgaacaggaatgttcctgttccccatgaggtttgctaaaagacccctttggtggtaggttgacaccccagcaagtggcctagcatggtccgaggcagccgcatagcctgtctgcatgatagcaggcttcagggatccagcttagctggaggcttgactgtgctagcctcggtggtacctgcactgtcattccatatgtcacaatccagggaagagaggctatcaccgagaagagttgtcagtaagaaggcaggacactctaacacgagcaaacccaccaggcttctgttgatccagggcagcatccccctcgcctggcagagttccttgccccacagccaaggctatgggaagcaaggcctccagcaaagctcatggctgccaccaaagcatctctgccaagatgcttcttatgatacttaggaaggatttccacccaaactggatcagggtcaccatgaccctgaatcacaaatccaacacaggctgattccaatcatggtttgaagctttagctgaaaagtttgctgtttgaaaaccatcaatgtgggggcgatgggtgtgcagggtaggaagggaacgcactattttccagtggaggaagagggtatgcctctttaggaaactgttctgggtagagactgctgtgggtgtttcctcaagcacagataataaccaggagatcaagccccaacatgcgggtaatggagtttatgtaacattgaaactcaatgactttggaactttaaaaacatctatagtaagaattcaaaacaccaagatctgaaggctaccccagagagcaaaggggcagccttcagatccaagtggcccaagacagaacctacagtagctatggattttctctaagaggaatcgggcactcatgacttcacttcccagagctctgcccagctgcccagcagcctggagatttccagaacaatggggagtaggtcaccctgccctgataggcaccagggggtggaaacgcctcctcgcccacaacacaatcactctcacccctttcctggctaaatcccacctcccaccctcccgccagctcccctcccatgctcccaatccttgggacctcttggggaattatccaaggagagttctgcctgctgtattttcactagggtcttgggacttctgcaggcagtcagcccaagtgcctacagcctgcctacttgggggagcagatggagagtgtggcaccagcagaaaatacccagaaagccgggtacaaagcctcagtaaagtccaccctgaacttatacatcaggtggaccttgtcggcaacagcgaagaagatgacaaagccgtggtcacagttgagaagcacgcccacccgcgtggccttggtggagggcagggttttctccacgttattgtgccaggcagagatcttggtgttgaaccactccacgcaccaggaggcgctgttgcggccgagcctgctttctgggccctgccggttcatgcttccgtagcagatgcctaccccacagaagttgttcttctgcagctccacctcccagtagtggatccccttcttgtagcagtgcaggcccagcacctgagagcagtatgtgaacctctggggatgcggccggtagttctgaggcatctcagccacagaagctactgtatagcactctgacagagccactttgttgtgggcggtgttgtagtccaggatgactttaatgtaatctgagaaaacatcaccccaaggaattaattacaaggggcccaaagtgctcttttagacctttgccaaagtggtactatttattcactagttttatccatccatgcacccatctacccattggtccatccatccactcatctatccatctgtctgtctattcatccatctatctgtctatccatgtatccatcaatccatccatgtatccatccatccatctatccatctacccatgtatccatatacccatctatctacctatctatccattcttccattcatccatctatccacttatctatccatccttctgcctttccatttatccattcattcattcattaatctatccacttatctatccatctgtccatttatccatccacccatctatccacccatccattattcatcagctcatctatccatccattcatccatccattctgtccagccagccagccatctatcatctatcagtcatccgtatgtctgtccattcatccatccaaaaccatttaccaggcacctgactgacaccagattctggcacaagatgcacaaccatgaaccagagagacaaggtgccgggcctcatggagttcacactccaacaagcaaggcaagtccatcagtaacaacaccatgagactcacactctgccaaaagggtaagcacacactgtagggacacagagacaaggcaactgatgctacagttggggaacatttcactggcaggctggaattggagccaagtaacagaagatgagaactagacagaggagaacagagagagaaaagctgttccagacagagggaacagtgagagtgaagccacggagtgccaaggggattcgcatgtgctgggatcggggaagctgggtggctgggaacacagatgcagcaggagaagggaaacatgttggggctagaaagggaagggcttaggaggctagactttaactggtgggcagcagggagccaagcgaggcactcatttgctaggtggctcagggcatgacacttttcactggagcccgagtttcccccaaggcaaaatgaataagctgggggtggaaaaggccctaagttgatagaattttactttccctgtttatgcggctgccacagagtgcacagcagctcctgaaagacgtggctcagcaccgccgctagcagcttgggcaagagttagctgcagcccagggctggtctgggcctctcttggggggcagggacagcggagggctacaagaaggccagccctgaaaaagcaagggacccacagatccccaccaagcctgctgcagctgcttatgataaaggaagggctatatttttcagtgattggctttggcctccacatggaagtgggtaccactggcaggtgctgcctggagtgttgcacgtgggtgcagaagaaacaagaagacggaaagtgggagggccctaggcctggccttgacaacggaactccacccacttccaggttggacgagcttgcaaaggaggggtggatggaaacccaggggggtatagcagctcaagcggcaaggggagagagtgtcagaaggaggaggaatgccactgacaggtgaagctaaataaaagctgaaaggcgtccctggattttgtgacacggagtaccctgatgacctcagagctgcctgggtcaagggcaggacagaggtcagaatgcagtggcacgaggattagacttcaggctcccacctcggccccacattgcaaccctgggcagccaaacaccaacattctgaatgaaccagtctgggggacagcctgggcatcggggattttaaaaagctccccaggattccaacacgcagccacagttgagagccaccaatgtagaaaatctgcagagctgcttttccccaactgtcctcaaaaggatcatggaggaaatgagctaaacatacagctttccgtgcttgcctgagtctgatcttgtagggctagaacagggcccaggaatttggtttttggggttttttgtttgtttgtttgttttttaagacagagtctcgctctgttgcccagactggagtgcagtggcacaatctcggctcactgcaacctccacctcccaagttcaagtgattctcgtgcctcagcctcccaagtagctgggattataggcatgtgccaccacgcccggctaattttttgtatttttagtagagatggggttttgccatgttggccaggctggtcttgaactcctgacctcaggtgatccacctgcctcgggctcccaaagtgctgggattacaggcatgagccaccgcacccagctagtaatttgtatttttaacaagcattcgggtgaaagggaggcaggaaacagagctgcagctgagacagttttgctaggtttgtttttgtgatttggagagatgtaaacgtgctacagataggcaagcctaggtagagatgctgagggtgaagagatgggaatggaaaggcctaagagagagcagaagattccagagagcgtgtggggagcagactccagagcccagggccagggggtcttgggaaaggggccaggaggcgaggaagggggcacagtagatgcagatgcgatgtcaataacagagcagggggagccccttctacagtgtctgtctttttcgtgaagcagaaggtgggcgggacagggagaaggatggagctatggccagtgggaagtcttgggaatggtggctctggagagtggtggggaggagacaggagatgcagggcaggcatgccggcaacgggacgcccggtgaaggccggtgaccgcaatcgccctgccttctctgcagaggacatgcaggcgccgacccacagagaaaggtgagctcaattgggccagactagacggcaagagggagagtcaaaggaccgattgtgaaatctgagctagttaggaaaagtaaagaaaggcactgatgactgggagaaaataagggagcaacaaagtagaggacaagtgaaggggagtggctgatatagccggccagctggcctcacagagagctgcacagagcggcgcaggagagacagaaccagtggaaccgcgcaccagccccgaagctactcacactccaggagctcaggtctggacttggccaggaaggtctccagcaccttggccttgagagatgttgagttcggatgtgagctggtggctttggctgcagctgggagaggaaacagagagtgatttgcagaacaaactcagagtggacaccccaaagctccttgcccatgataacttaccctccaagccagcttgttttaaatccactaactgttccggggctccaaacgtgggaagcttgctgggtaaggcagggacaggggctgggggtaaggaaagggaaatatgatacagagcaacgggatggcctctactcccttccacactgattaagagccacttctacaaacacacgcctgaacagcaggacaacacaggggaaaacagacaaggctaaagtcaccttattcatctcacttatgcttgtcctcccctccagcctcaggcctgctgccattacagaatggaatcatatagaacccatcacagaaccctgatgagagaggtcgactctcactaccagcatttagttctgtgctcgggcagtctcaagaaacgaacagttgcagaaatgcataacttacgaggtttcttggatttcttttcctcttctgcaaaagaaagttttcagatttaatttcttttaaggcacaacacaatgacattttcaaaataataacattcatgtgcatgaatttgacccagacaaataaaaggatgttttaatttgaaaaacagaaggagtcagcaggcaaaatgaatctatagtgatagaaaccagcatgagcggtcgtgggggcggggactgactaataaggagcatgaaggaattttctggagaaagggaaattctttatcttgatttgaacaatggtaacacatgtatgcatttgtcaaaatagatctaactgcacatttaagatttactgcagggaaaaaagagatttactgcaggtaaattatatttccataaaggaaaaaacacaaaaaccaaatagggaatcagaaaaaaaaaaatgcttgccaagggctgggcgcatggtggctcatgcctggaatcccagcaatttgggaggccaaggtgcaggaaccacttgatctcaagcgttagaaactagcatgggcaacatggggaaaccccatctctacaaaattacaaaaaaaaaaaaaaagaaaaaactagccaggcctagtggcacacacctgtagtcccagctacttgggaggtgaggcagaagaattgcttgagcccaggaggatgaggctgcagtgagctgtgttcttgccactgcactccagcctcagcaacaaaatgagaccctgtctcaaaaaaaaaaaaaaatgcttgccaagtcttttaaaaatatctggagtgtctacctacaggaactgagtttggctaaaatagtcgttctcaaagtctggtgcccaagccagctgcagtgacatcaccagagaacccctaagaaatgcaaattattggtcaggcactgtagcttactcctgtaatcccagcaatttgggaggctgaggtaggaggattgcttgaggccaggagttcaagatcagcctggacaacatatcaatatcctgtctctacaaaaaaaaaaaaattgttttaattagcctggcttagtggcacatgcctacagtcctaactcctcaagaggctaaggtaggaggatcacttgagcccaggagttcgaggctgcaatgagttctgttcgcaccactgcactccagcctaggcaaaagagcgagactctgtctcttaaaaaatagtaaatgcaaattcttgggccccaagccagagccactgaatcataaaggctgggggtgagacccagcaatctgtgatgtacaagccctccaggtgagtccaaagtccactcaagtgggctagaagatcccagcttccttctttgccaccttccacaacactggaacaaaaaggggcgtttttgaaatcatatccctgcccacctgcaggacacctgacattacagataagccctgctctctcctattaccctctccctcccccagacccccatcacaccacaaagcccccttgctaccgcttctcctacttcgaagtcacatcactcacagtcgctcactctcccatttcctccccttctgccactttcccacccactccctgtggaccagcatcttgggaggcccaggctgtgacatcaatctagggcacaggcacctccctcatcacctacccttagacatctctctgcactgggactactccataccccctcccctatttccccatttcagcctagaggagccttgattcattcccgaactttattctccagggtgtcattctgctgtgacatgaggacctcacctcactggggaacacacctgcctgctggccggcatccctacctcattcatactaagggaggagctttcagaggaaggtgactggggaaggacacaggtcaacagtacctttccacttcctctttcactcctcttttcacacaaagtacccttcgaggttttccggcccagctaagggctccctcctccatctgcaccaggcatcccagccctgactctgttccattcggggaccgataccacactctgcctgctacaggtgacctgaacactaagcacaagcaacaacaacaaagagcaagccctggctctctcatccccccaacaccagcagtgtgcagccagccctcctgggttcacaccaacttttcagggaagcaatgacagctaacatttcagtggtatatggacatgtcagtggtatatgaacatgtcagcggtatatgggcatgtcagcggtatatggacatctcagcgatatatgaacatgtcagcggtatatggacatgtcagcagtatatggacatctcagcggtatatggacatgtcagcagtatatgaacatctcagcggtatatggacatgtcagcggtatatggacatctcagtggtatatggacatctcagtggtatatggacatctcagtggtatatggctcataaagagctctcacaatcagtgtcccctcatcactcagaatcatcctgtggcctcgatatcactattgtccacatttgcagaacaggaccactcttctcctcaacccccatgtcaatggcaggtgcctgcccaatgagggggatagtacccctaggagggcaaaaatggatccttgggggagggggagtaaaaaagattactctttttatgtgtaaaagcacaaacataaacagttatgcagtagatgggtggtattaaaatttcatgggttgtaattaggaaaaaaattttctcaaatggttctggggatgagcaggaggagggtaacagtgagaaaccaaaaaaaaaaaaacagttgagaaacatggtaatagcagaagcccattacaacccagagacttaacactgctgagatgccaaggaggtttagcctccacccttcctggaccgccatcagtctccttgcccaaggctctgcccaaggacttgggtatagtaaatatttctcaaaacaagccagcctcaggcatcttgctgttccaggcagcccaaacgtgcaatgctgatggacagcggagcttctgccacagccctacagccccccgcagtggggactgccaccaacttctttcccactgaggtccaggccccacagtgactcgggatgggccggaagtgacttggccagagcctggggaggccacagccatgctgttgccatggagacaggggtggggctacttactggagaccttcttcacagggcgtgtggatttgtgtgtggacgctgggtcatgctctccagggtcacctgtgtcagagaagaagggctcagtgtgtgcggctcctctcactgaccctagcagccagctttgccatgggtcggtgggcaggcagagggtttacacagacagccatttcctccgaccttccccatcccatcgcttacaagagctacaaacaaggtgatctaagaaccagtttggtgtattcccttttttctctgactttttaaaatgtagcaagggccaagtcttttttccaccagcacccagctctgtggcctctgagacttctctgagctttggtttcttcgagcacacaatggggatgacttcaccttgctcatggttgatgtgactcctgaatgagatcaaggtcatgtagcggaggctgggtcaacacttgttcctttcccactattctttctctcccctcctcccacataccagccacctatagctttgcccccacgcagcacttccacaatggggctgcaccgccaccgatttcagaagcccttctgcaaggacactcggcaggccaagctgagattcaagcccaatcttggactacacaacagagatttactatgggccaggctctgtgctaggcactagggaaatagcgttgaagaaaaatcagacaggccaggcacagtggctcaagcctgtaatcccaatgatttgggaggccaaggcaggagcatcacttgaagccaggagctcaagatcagtctggacaacttagcgagaccctggctctacaaaaaaaattttttaggctgggcccggtggctcacgcctgtaatcccagcattttgggaggctgaggcaggcagattacttgaggtcgagagttcaagactagcctgaccaaagtagtgaaaccatgtctctattaaaaatacaaaaattagccaggtgtggtggcacatgcctgtaatcccagctactcaggaggctgaggcaggagaaatgcttgaacctgggtggcagaggttgcagtgagcagagattgggccattgcactccagcctgggtgacagagcgagactccgtctcaaaaaaaaaaaaatttttttttaattagccgggcatgatggtgtgtatctatagtcctagctagtcgggaggctgaggcagagggatcacttaatcccaggagtttgaggttacagtgaactataatcacgccattgcattccggcctgggcgacagagcaagatcctgaataaataaataaataagccgcagcccctgacctcacagagatcacaacctaatgagggagatatacggggatcccaaggaagaatgcgatactacccatgcaagagtcccaagaggatgacaaggaccctgggcccagtctgaggagtgggagcagtggcaggggaggctggctataaatgtaatgttttgctgatctttgaagggtgagaggagttaattagtgaagacggtggagttcaagccttctggagagtggggaagagcaaacacaaaggccctgtagcaggaagttttgcatatttgaggaactgaatgcagagagatgcaccagaggagagtggggggcgccttggggctggagagagaccaacagggcttgacctggcatctagaccagggtcaagggtttggtctgcatcagggagtaataggaagcctagtgagagggcaaagcagaataggtcccaggacatgagctctgcatcatgaaaatccctctctggctgcagcggcagatgcagagggtttaggaagctgctacagtcatggggcgacaggtgatggcaatggagaacaggcaagcagtgctaggatcagcagactgagtcaggagattgaaagaagtgaaatttggcaatggattggatatggggtgatgaaaagggggtgtcaaagaggaattctagatttctcccccaaacgggccattcccccaccaaacacaataacaagccctagcttattcaaaacccatccaagttggcctcaagatcacaggccaaaagagcctatctgtccagaaagtccaagcattaacatcaagtccccaaaaatgctttaggaaagatcctaaaatgtcaggatgaagcagactccccaccagcctccagacagagggcggatgtttcaggagccctgaaactcaggccccagtgctcgggatcacgccccaatctcccatcccaaaacatttaggggacccatcgggttgcagggttccacagggggcagcatagggggctgctaaggtcacctgaactgggggtgggctcctggagccgcccgatgcactgcttcagctcgtttttgaggtctatggtgctctggtggatgccttttatcagcttgtggttcagttccacctcggggatgtagactggctttgttgagattcctcgcagttttgatgctttctggaacatgccagggggttagtgcaggcagctctggtgaaacggggacctgggctcagtcctcaccaaccccaggaggctctcccctatgcccaagagtgctaagtccaattggccttctcaaattacaggccagaggtcaccaggagtttaaatgacacttgaagacacagtaatctggagctggaggggaccccagaggtcactcatcttacagatggggaaactgaggtctagacatggcaggaactccaccagctaggggcacagacacagctgggactgagatcttccgatcccccaggacaatgttctttccacttttccagctaaaggtggaaaagcacaggaaactcaggaccaccccaatcctaggggaacagctctaatcacacattctggtaacagacagggacatctcaagggatgtggattgcagccagggaatatcttatgggaagggagggtcttcctggaagtcccaaactttgagaaaaatagggttgtacagtatcaagaagcctagatgtgcactcagatccttcgagagctcggggcagctgctccaacagacaggaatgaacacttgggatgaaacttaacgccatccagactaggcacgcatcaggcctcagtgcacagagacaaggttcccattcactcctgcactgtctccccaccccctgatctgaacaaggaatctgggtctttcaggtatagctgcaggtcactcaatcaatggggcacaccactatatgccaagcactctgctatgtgctggtcagattggcaggaggatgaatgggggtaataagagatgggcttacagtcaaaacagccatgaaaaaatgcacatctgaaacaacatcacccaatgttactgtagaaacagtgtggcatgcttgggaacaccgatacggcatggcaatgggatccaaggccctggaaggatacgactcactaggcaagaatgcccagcatggcatcccacccacacccactgtgtctggggaacagtgagtgcatagggcatgagccagggatggatgatatgagatgagactgctggcacaggcggggcccagtcacctaggaccctgcaggccatgttaagggacatgaggccagaaacagcagggggcccatgctttagacagatactttgatacagtctggatgtttgtcccctccaaatctcatgttggaatgtgattcccagtgttggaggtggggcagggtgggaggtgttcgtgtcgtgggggtggattccccatgcaccgcttggtgccctccccatggtaacaggtgagttcttgcacaaactggttgtttaacggaggctggcacttcctcctctgtctcttgttccctctctaaccctgtgacatgcctgctcccagcttcaccttctgccatgagtaaaagcttccttcctcaccaaaggcctaactaaaagccaaacagatgctggtgccatgcttgtacaacctgtagaactgtgagccaaataaacctcttttctttataaattactcagtctggttgggcgcagtggctcacacctgtaatctcagcactttgggaggccgaggtgggtggatcacctgaggtcaggagttcgagaccagcctggccaacatggtgaaatctcgtctctactaaaaatacaaaattagctgggcatggtggcgtgcgcctgtaatcccagctactcaggaggctgaggcaggaggatcacttgagcctgggggcagaggtttcagtgagcaagatcacaccactacactccagcctgagcaacaagagtgaaactccatctcaaaataaatacataaaataaataaataactcagtcttaggtactcctttatagcaatgcaaaagggactactaacacacacttccaggagctgctggaggaaggatgggaggaagaggtggagtgtgagtggcaggcaacgttctaagatggccctcaagcccccgaccccgactgatgtacataccctatagtatgccctccccttcagtatcggcaggacggtgaatgaaataggatatcactcctgtgattaggttatgtcatgtggcaaagggggtggaatattgctggtgtaattagcatctcaaatcaattgattttgagttcatcaaagggcaattatctggggtgggcctgacttaatcaggtaaaagaccttaaaagagggattgcatctttctagaggagaaattctcatgctggccttgaagaagtcagctatcaatctgagagacagccagcaggaaattgcggggggcctcagtcctacaaccataaggaactaaattctgccaacaaccacatgagcctggaagacaaccctgagctccaaaggaaacagcctggccatccctcgcagactgtagcctggtgagaccctatgcaggccacccataaagccatgtccagattcctgagccagagaaactctgagagaataaatatgtgttttttgaagcccctacatttgtggtaagttgttgcccagctcagaaaactaatacagcgtgtgtctcagggatgcttccagtgacctcttccagtctcccgctccttgagggccctatcatcaacagcatgacatcaggcaaaaaaaaaaaaaaaacattcaacaatgccttgtggcgacctacctccagaaactcgaactcatccctcttggtcaggctctgttcaatctcctccttcaaggtctggatctcactcttcttcttgaggagaatctgataaatggtgtcaaacttgctgttgaccctcttctcctcttcctttatcttccttgtcgaggtggtctctgaggcgtccaagagagccttcatttccgtgtattcttgttgtagctgctccacctttctgtttgcagtcatctgagagggccaaggtaagaggatgcccgtcaaaggggcaaaagtgctaaggctgcagccccaagcatgggtgagatgtggagttccaggaactcttacctgtactttgtgggagaacaaaccactgtggggagcaacttggcaatatctaataaatttggaggtgctcataggctatgactcggcaactccagtcctaggaatatgtgctacaaaaaattgcagccacctgcccctgagacatgcataagaatgttcacaggcagcattgtctgaagtagcaaaaacctggaatcaacctgaacatccatcagaagaagacttgaagcaaagactgggagctattcataggatggaatattaaacagttatgaaaattaataaactggagctatgcctggataaatctccatgagagaaaaacaacttgcagaagaagatccaccatatgatgctctttcaataaagcttagaaacaaacagaatggctatatgcacaaagaaacgcatgggaatgaataaataaattcaggagagtggttacttctggaagagaggaagagggatagaataagggagaaacagatgggaggggctgcatcgatgatattttatttcttaagctaaaggtggttcatgggcaatttttaaaaataaaagtcagcaagagatcaagaccattctggccaacatggtgaaaccccatctctactaaaaatacaaaaattagctggttgtggcagcgcgcacctgtagtcccagctactcaggaggctgagggaggagaatcgcttgaacccaggaggcagaggttacagtgagccgagatcgtgccactgcactccagcctgggagacacagcgagacgctatctcaaaaaaataaaataaaataaaacaaaacaaaaagtcaggatgcagctctggaaaatttctagagaatatcatgctctaggattgtactttccaataacatagccacttgctacatgtggctactgagcacttgaaatgtggttagtccaaactgagacttgccatgagtgtaaaatacatactggctttcaagggtttcacaccaaaaaaaggaatgtaaaatatcttaaaacttttaaattgatgatatgttgaaagaataatatttaagatataccaaattaaataaactataatattaaaattaatctcagtcaagtgcagtgattcatgctcataatcccagcaccttgggagaccgaggcaggaggatcgcttgaggccaggagttcaagaccagcctgggcaacatagacagactgtttctctacaaaaataaaaataaaaaaattagatggactgtattcctggagagtgggggtggtgaaggggagtaggctcagtcaggaagattacttgagcccaggagttcaaagctgcagtgagctatgattgttccactgcactccagcctgggtgatagagtgagacctgtcctaaaaaagatagataaataaaatacaataaatctcatgtactattcaaattaacttaaaatgacatctgcactcctactgtatttctgctggacagcactgctttagtagctgcaattttgtttcacatcttgggtagcctcaatagctgctatggtttgaatgtctcctccaaagctcatgctgagatttaattgccactgaggtgattagatcacgagggctctgccctcatgaatggattcatattcttatcacagggtttgacctccttcttcctgtcccgctctcctgccttccatccttccgctatggatgatcctcaccagatgctggaagcatgctcttggacctctcaggctccagaactttgagccaaataaacttctcttctttgcaaatacccagtctgtggtattccgttatagcagcagaaaacagactaagacaatagctcagaatcaaacataacaaagagaaaaacacacaagaaggacagtagactggaaaagaggaattcaagtatttcttcgccaatattttttttttttgagatgaagtttcactcttgtcacccaggctgaagtgcaatgacatgacctcggctcactgcaacctctgcctcccgggttcaagtaattatcctacctcagcctcctgagtagctggaactataggcatgcaccaccacgcccggctaattttttgtatttttagtagagatggggtttcgccatgttggccaggctggtcttgaactgctgacctcaggtgatccatgcgtctcggcctcccaaagtgctgggattacaggcgtgagccattgcgcccagccttctttgccaatctttcactgtgcaacttctaatgtgactacaagtgtcccccagtgttcattttcccttttttccttttggtaagagaacatccctggagtttcatctgggcgtgtggctactcagactacatttcccagcctcccctgcagctagactaggcgatgtgacaaaactccttccagtgacccatgcccaggagtgatatgtgcaacactgtgtcacttgtgtaaaggaaaattgcttgttgtcctccacctcctttttgtccctttgtcacaggctagaacaaagatgtaatggtaacccagcttcaaccaaagaggctgggacaataccttgtggaatagtagggtaataagaagggagaacccttaatccctgaatgatcacatgaacccttagtctgggttactcatgtgtgggtttggactgtcagttggtaaaataaacttcaatcatatttaagcctctgaattctggtgtatctttgttacagcagtatagcctgccctctaacaaatacaggtactttcacgtgcattctttcatttgtctcacagtcatcttcagaaagaacttgtgattccattgtgcaaattgggaaacgaaggttcaaagatctgtcaacatgaccaaagcaacataaactagtatgtgacagagctggtattctaacctagatctcatctaatgaaaccataactgctgcaataaaactggtgctgcagctctgaaaaagggtaaaaatctgatctttccatttaaaagcaatttaaacgtatcgaaaatctgaaaaacagggggaacaaaaccattcctaatttaccactccaacacttccactatgatccttctataatattccctttcagtttctttccatgctctctgtaatgggttgaatgctgggcccccaaaagacatgtccatataccagaacctgtgactgtaatcttacttaggaaagaggtctttgcagatgcaattaaagatcttgagattcgatcatcatagattacctaggtgctccctaaatccaatgacaagggttcttattggagatggaagacactaagggaagaagagacaggtatgtgaagacagaggcagagatcagagtgatgcagtcaaaagccaaggaatgcctgagccaccagaaactgtaagaagcaaagaagggttctcccctagagacttcgggagtgtggccacgccaacatcttgattttggacttctggcctccagaactctgccagaatacatttctgttgttgtaagccaccaagtttctggcaatttgtcacagtagccctatgaaactaatatacttcctttttgtaaatagatgcaaccctatgagctatatacttttgcttcctctttttctcccactttatatcataaccatttttctgaattactactttttaatcctaatttataatgatttcccccacagttgggcttataggtaatttttggtttgggtttgcaaaggatctctctcagacacacagctgtctgcatgctttgcaaggttgatgtttcatcctgacactgtgagtgcacccaacaccagccttgtcatggtcagagccacgcccatcccgcgtggaagctgagcgaagccacagggcagggctggccttggagagccctgccactcacccgcacatcctgctgcctgtttctcacatcatccagtgctctcgacgccccgttgatctgactgtacatgacagttagtttgtgcctcagggtggcctgcagggaaaacaaatgaggttgagaatgcacctcttcagcccagccccaccagaagccatccctggaactatcccacaggatagattccttcctcttccactccacccaagtcttgccaccccaagtcctgtcacccgagtcttgcctgcttggagctttttgaagcattctaatacttactacttcccttcatccttttcagaggacagtacagaccagggttccagtcccaactcccagctgtgcaactgtgtccttcacctcagttttcttggacacaaaatagatacaactgtccccagctcacagggctattgggaggattaattgaaacaatgtaagtactcagcccaatgcctggatcttaggaaaaacatactaaatgccagcttatattattatgagtttttctctaattacccattttacagccaatgaaactcaagcaaggaggacagaaaggtggccaagctcacacaggaacagaacgagctgggacagctgcttcggtaatggcaggtggggccactcagaccaatcctcccactgcaaacagccaggaaagcagtccaaataatggggcagcggggagatctgctaaaagatgctggagagccaatcaagcagaggattaagaagtcaaggtccaggagaagggggaagggggcccagagagataagcctgatatctaggatgttctctccagaggcatctgccaatcccagaacaaggctgggagcctttgtcagcctcacagggcagggagacagaaatcagagtccaaggctcactgcagactgggaccaccaagggctgggaataagatgaatcagccagccaggcgcagtggctcatgcctgtaatcctagcactttaggaggcccaggcaggtggatcatttgctctcaggagttcgagaccagcttgggcaacatggcaaaaccctgtctctactaaaaatacaaaaattagccaggtgtggtggtgcacacctgtagtcccagctacttagggggctgaggcaggaggatcgcttgattccgggaggttgagcctgcagtgagctgagatggcatcactgcactccagcctgggtgacaaagtgagaccctgtctcaaaaaaaaaaaaaaaaagatgaagtagctcacaggggctgaagcccaggtgcaaatctgctcagtcctagccacctccagaaacaaaggcaaactgtatatgaaggaagctaatatcctcatctgatttcaattaattttcataatcaatatctgagtctcctacctccctgctcagatgaatactgcacagaaatgggaaggaaaatcaccaccaccataacagcagcagccagtatttattatgcacttactgtatgccaggcactgttctagtgctttacctgtattaacttacttaaagctaagaacaacactatgaggtaggaattacccagcctttacagacaaggacactgaggcacagaacaattaagtgacttgccccagctacactactagtaactggcacagctaagatcccgatattaaaatcatagacacatgcccaaactgagcatgctggagatttctagaaaaaaaaaatttccttcccgtaactagcaggctcaacatactctggctctctcttccacttcccagactcttcaactccacccaagatattctgggcggaacctgatcttgaatctagatttgaacaacccagtgacagtcacatgtaggggttggaggcagggaccaaggccacactaactcaatccgaaaagcccaagctgctcatgatgtttcaaacttgacctctgtgacactgcccttcgacctggcctctaacagtggccaagataaggtgtgggccaaagaccaggcctacatacatccggccttgctggcctcagagcaagaagagacctcagaacaccccaaggctgccaactgcttcactttcaagagctgctcatagcactacaccctgagccctatattttgaaagatttgatacaccattaatcaaacacatgcggcagtaccctcatcatgaatggtgcccacacgactccagaccaaaggaaagtgacccaaaaactttggtagcagcaataatcccctaatcaaaggcaaaggactttttgaaatcctgaggatcccttcacagactagagacttgggtcttccacatgggaggcaccagagtctcaagtccgaccccaccagtggccaaggcaacccagcccccgaggctaagggcattgcccagctgagactggctctgccaacagtgatgagcagcagtagcagggctcaaaaagcagacctgttataggactcagcaagtcaggacaggggggtaggtgttggcagaggaaggcctgttgttaggattaaacagcagagtttaggccaggctcctggctcacgcctgtaatcccagcacttcaggaggctgaagtgggaggatcccttgaggttgggagttcaagaccagcctggacaacatagtgagatcccgtctctacaaaaaatgttttaaaatattagctgggtgtggtggtgcgtgcttgtagtcctagctactcaggaggctgaggcaggaggatcacctgagtccagggtttaaggttatagtgagctatgatcatgctactgtagtccagcctgggtgactgagtgaaaacctgtctctaaaagaaaagattaaaaaatatatatatatgggccgggcgtggtggctcacgcttgtaatcccagcactttgggaggccgaggcgggtggatcacaagggcaggaattcgagaccagcctggccaacatggtgaaactcagtctctactaaaaatacaaaaattagctgggcatggtggcgcaggcctgtagtcccagctgctcgggaggttgaggcaggagaatcgcttgaactcgggaggtggaggttgcagtgagccgagaccgcaccactgcactccagcctggcgacagaacaagactccaactcaaaaaaaaaaaaaaattctgattttatagccaggccccatggtagcacacctgtagttccagctactcaggaggctaagatgggagaaggattgaggccaggagttcaagaccagcctgagcaacatagtgagatcccatctttacaaaagaattttttaaaacttagccaggtgtggtggctcacatttgtagtactacctactcaggaggctgaggcaagtggatcacctgagcccaggagtttgagattacagtgagctatgatcaccccactgtactccagcctgggtgacagagtaagatcctgtctctaaaagaagaaaaaaaaaagccaagtttagagccaggcacggtggcacacctgtagtcccagctactcaggaggctgagatgggaggatcccttgaggccggaagttcaagaacatcctaggcaacatagcaagaccctgtctctaaaagaaaagaaaaaaaaagccaagtttatatgctacacaaagctggatgcagacccccaactctgaccttgctcaggctactgtctcctctgacaacacgaagacgggtcttgttctccctgaaggtgctgtgagaatgaaatgaaatcaggccatgctttggatcttaggctgatgtaacaaaaggtggtttgatttcagcctctgctttgaggccacaaggggaaggtatgatccccaaaccacctaaaaacattgcagacctgaaaggcccttaggaatccacctagtcccacagcctcactatactggtgaggacccaggtccaggggccaaaccccatgctcaaagtcacacggccaggacggaggacactatggtgcaagagtgttggctctccctgtggctctgatccagtgattactgggacgctgcccaccctccctcttaggcctctaataacaacccttcctgatcacaggaactctccggcccaccaaaggcttttgcttacatgacctcaagcttcctggactgtttggtgctccggactctacggacctggatacgaggctggtccatgggaagaaatgcaaactatgaaatcgaaccaacccgggtcacaatgcctgcgtggctatttactgcattaggtcaggctaagttcatttctctggacctcagtatcctcaacagtaaaatgaaactaaatcatatccacctcctgggtgccaccaggacttcgtgagggaacagaggtaacctccaacgttcatagttgacattcaaaaccctctactaaacaccatcagatggtggggcgcagtggtgcacgcctttaaagacctcctagcactttaggaggtcgaggtgggcagatcgcttgagctcaggaattcgagaccagcctgggcaacatggcgaaacctcatctctacaaaaaattagcgagcctgtggtcccagctacttgggaggctgtggtcccagctactcttgaggctgaggtaggaggatcccttaagcccgggaagtcgaggctgcagtgagctgtgattccgccactgcactccagcttgggtgagagggacgagaccctgtctcaaaaaaataaaaataaacaccatcagacaatgacaggattatggcaagcaacctaacctgtcttcatggatgatgggaagggactatataatctcccatcccctttctactctgacattggagatgccccggcctcgaattcaggcccatctccccagggcgtccagagtgtggcagagaggcccccggtggcccctctgcaccacccatcaggccaggctgccctctgcacccagcaggccgttccctacctccaggtcggcgctggcctggctcagggacgcgggagagcaggtcttatgctccaccaggcagatgtggcagatgcactcgctgtgctcggggcagaaaaattcccgcagccgattgtgctgggaacatttgcggcgcaacaggtcgcgaacgggcggctgcagcgggtggtcctggaaggcggggctgtcgaagtgcggctgcaggtgctcctgacagaaggaggccatgcacaccaagcacgtcttcacggcggcctccttcaggcagtggtcgcaggccacctgggcattcgggctgggtgcagaggcgcgggcgggcggcgtccagacgtcggcgggtggctcccgggccaggtcggcctgcaggaactgctccaccacgttgcacagcaccgtgttcttgtgcagctgcggtcgcgcctggtagacggcgcggcactgcgggcacaggtatggcgagccctggactgcccacgtctcattcaggcacgacccgcagaagttgtggccgcacggagtggtgaccggctccttgaagggctccaggcagatggagcacgacagctcctcggccagggggcacagctctgccatggcgctcccaggggtcgggacacaactgctgcacccgcgctccgaggccgccgaggaaacgaaacctagctcgagaggagcagtccctgaagccgtcaggaagtcacgtggggtgcgggggggcgggcggcgaggactgggcgggcctcgcgaggtactcccgggagcctgcgggcaccgcagtcccagtcgcccatgagctggcgaaggtcggccgcgctccgatccccaagagctcccgcgggctgggcgcgggacgccgggctcggccttagcccccgggatttagagcatcctcgcgaccacccggaggcttctgggggccactctgcggatgaggaagctgacgcctgggtgcagaaccccggacccccggattcagagcccaggtccagccgcgcttccgcacaaacttgcgctcggagcaagtcccctccttcccagcactcatctgagaccagaggtgtccccaccgtccccgctagcagcgctggttatattgtgggccaacctttaaaaaaataaaaaggaactgttaaaccacagtgctttttttcttcttcttttttcttttttttaatccttcctctttcctcttcccggactcggacatgcggacatacaatcccggaagactggaggccgtagtcacacactcaaatttaaacctggtgatttctttccattctactgatgtatcatgcttttataaaaattcccatttctactttcctgggatttggagttacccagtttaacaaaggctttctctctccttctctctctgtctctctccctcgctcgctcgctctctttctctctgtcgcgcgcgcgcacactcacacacacaatattggaacttaaatatttttctcaaagttattgatttaaacttacttcctttaatattttcttttgctctgttttccctcctctggcttgactgcaggacatatgggtggacaggagagtagaagtgttcaaaagaggggggatggtggcaaagagaaggatggtgttttggaaggagttagttggagtttgctttggggacagagtgagtagcaaaatgaggaaaaggtaaatgtcttagattaccttgtaatagctactatttatgggggggtaccttttgtgtgctagataagtcacatggttatctcttataatccttataaacccctgcaagactgccagtccattttaggaatgagagtctcaatttatgcaaagcaggactgggactgtagctcaggatcgctgacctccccattgtcactcactcctggtccccctaattcttgttctgcagactccttttcccctaaaaccttttaccatttaccttttatgtattccctttctttcttttcttttctcttctcttttctttttttttctttctttctttttcttgacaaggttttgctctgttgtctagggtgcggcactcctcccaagtagctgggaatacaagcacgtgccaccacacccagctaatttttgaaaacattgttttgtagagacaaggtctctgtacgttgcctgggctcattttgaacttctgacctcaagcaaccctcccacctcagcctctcaaagtgccaaaattacaggcatgagccaccatgggcctgtcccacatcttgtttgcacagagaggaggaagacagaagaatgaggggataggaaatgaaagctatgcatagaatctcatttcaccaaaaaaaaaaaaaaattacagatgagaaaactgaggcttagagaaactaaatagtgtgtctaagaatggacattggcacacagcccatctgctttccaaagccaggagtttcctaccataaaatgctgcctccaaagggaggagtggagcagtttccaggaaacactgtgaaatcccctctgacctatttatcatgggtgaggtggcctagtgattcatgccagaatgtggaattcactttccaggctggttggtttagaagggcttgttagaccaatgaggatgaataggagggccatactttatcaaattccatgcagtagatatttactaagacctactgtgcaataggcatgcaacagactgagtgctaaatgagtaagatgtgagtcaaacctgggcctgccttctaaaacaggaagaagacaacagcataaagcagtaaagagaaatatggggagaagtcaggtcctgctaggggtatggattcctcatctggacagtaagaatcccaataataccttcttcatgggatgttgtagaataaaaatgtaacacatgagcccgtcacggtggcttacatctgtaatcccagcactttgggaggatgaggcaggtgcatcacttgaggtcaggaatttgagaccagcctggtcaacatggtgaaaactctgtctctactaaaaatacaaaaattagctaggcatggcggcaggcacctgtaatcccagctacttgggaggctgaggcaggaaagcaggagaatcacttgaacccgggaggcggaggttctagtgagcagagatcgtggcactgcactccagcctcagcaacagagtgagactccaccaaaaagagagagaggaaggaaggaaggaaggaaggaaggaaggaaggaaggaaggaaggaaggaaggaaggaaggaaggaaggacacacgtaaatcccagcgattttatttaattttgagacggagtctcgctctgtcttgcccaggctggagtgcggtggcgccatctcagctcactgcaacctccacctcctgggttcaagcgattctcctgcctcagcatcccgagtagctgggattataggcacgcaccaccatgcccggctaatttttatatttttagtagagatggggtttcatcatgttggccaggctgatctcgaactcctgacctcaggacctgcccaccttggcctcccaaagtgctgggattacaggcatgagccaccgtgctgggtggtgcccggccttgtttcttttgtgttttttgttttgttttgtttaaacacacatgaattacagtaatataggcaggattggggcatcatgagtgttaatccttaaatgggctttggaggtccagggactgtccccagggctggagggtgtgtttatcatcagtaaccacagtagaacaatgttgtcaagtcaaatatgacccagctagtcaaaagggagctatatggcctaatccagcagatggctggctatcttaatcagattctcactctgcatctgtaggctaggaaaattaggtggagtaataaactttgtctgcaaatataatctgccaattatttctaccaatgacaattcatagaatttaaggtcagattgtgggtgtggttctaacacccagtgctccagtcctcaacactttatgaaggacatctgttccttttctcatttgaaagatgaccagagaagtctaaatgacctacaatcacacaaacggctacagacaaagtcctaggattatcattcctgagatatggaaaagactatggtgcccatgcccccacatgatgaaattttaaaacaagcaagcaaacaaaaatctattcttaaccagaaattaagtgtaaagagttctaacaaaatttctatcttttccataataactatgatcattttgttgttgaggtactctcttttattttatcaatacttttctaaacaacactgatcatagttttttttctttcttgatttggccaatatggtgaattatactaatgaaacatcaaaccaaccatgcattcctgaaataaacccccttggtcatgatgcattattgttttataaattgctggatttgatttgttggtgttttgttaagggtgtttacatctgtgtgcatgagggatggtagtctaaaattttcttgtaatatctttgtcaggatttgctatcaaggtcatgccgtattcatcaaaatgaattgagaactgttctttcctgtattttctgagcttgtgtaaaattggcattatttcttaaatgtttgatagaattcatggattctgaacctcttgaactggtcttctttgtctttttgctcgccttctaggaaatttccttaactttctcttctattaaagctatcccggggcacatgacgtcaggacctcctgaggctgagtcacagtcatgtgtccttaaaaaaaacaaaaaaacaaaaaaaaaaaactatcttggcctggaattttcttcataagaaggttttaaattactaattcagtttttttaactgttataggaatattcagcatttttgtttcttcttttgtttatttttacttattttttaccttcctggcttttatttcttcttgtgtcagtttttggtaagttgtctttttcaaggaatttgttcattttctttaatgaatttatggccaaaagattgtaatattgccatattattattattcctttattatttttttttaacctggctcattactgacagacctttcccattattttgtattttacattatattttgtattgagatataattcatatatgataaaattcatatttttaagtgtacaatttaatgtgttttgtatgttcaaaaggttgtacaaccatcaccactatctaattccagaacattttcattattccaaaagaaattctatacccatttagtagttattctccattcacctctgtatcccagcccctggcaatgactagtctactttctgtctatatggatttgcctactctggacatttcatataaatggaatcaaacattatgttctgttacacctggcttctttcactgagcacgtttcaaagttcatccatattgtaacctgtatcagtaatttgtcccttttatggctacctaatatttggcccttttacggctacaatcatagatatatcacatattttgtttatccactcatccattgatggacctttgggttgtttgcactttttgactattataaagaatactgctatgaacatttctggttttgtatgaacatgtgttctccgttctcatggggacatatacctaagtggaaatgctgtgtcatgtggtaattgtgtgtgtaacatttccaggaactgccaactgttttcgaaagccagtgtaccattttataatctcactagcagtatatgagggctccggttttgcaacatttgttattgtccatcttttttagtatagttctcctagtgggtgtgaagtgttacatcattatggttatgattagcatttcccaatgacaatgactaatgatgtttagcaacctttcatgtgtatgttgggcatttgtatatcttctttggaaaaaatgtctattggaatcctgtgccttttgtttttttttttttttttttttgagacaaggtcttgctctgttgcccgggctggagtgcagtggtgtgatcacagctcactatagcctcaacctcctgggctcaacctcccaagtagctgggaccacaagtacttgccaacacatccatctaatgttttagttttttatagagacagggtctcactatgttgcccaggctggtctcaaactcctggctcaagcaatcctcctgcctcagcctcccaaagtgttgggattacaggcatgagccaccacacctggcctcttctatgagatttatagtttagctcttccatttaggtctttgatccattttgaattaatttttatatatggtgtggggtaggggtccaatttcattcttttacatctagttatacaaacaccatttgttgaaaaggctatactctccccagtcgaaatatcttggcaacctggctgaaaccaattctccctaaatgcatgggcttatttctggactctcaattctattctgtctatgtctctccttatgccagcaccacagtcttgattactatatctttgtgataaatttcacaatcaggaaatgtgagtctttcaattttgctcttctctctcaagattgttttagctattctgggtctcttgaattttaacatcagctcttcaatatctgctaaaattccagctcagattttaatggggattgtgttgaatatgcagatcaatttgaggagtcatttggagtattgccatcttaacaatattaagtcttcagagttatgtacatgcgatgtcttcccatttatttagttctttcatttctttcaataagtttttttaatttgcggtgtacaattcttgcactttgttaaatttattcctaagtattatattctttttgattctattgtaaatagaattgttttcttttttgtttgtttgttggtttgagatggagtttcactcttgttgcccaggctggagtgcaatggcacgatcttggctcaccacaacctccgcctggtgggttcaagtgattctcctgcctcaaccttcctgagtagccaggattacaggcatgcgccaccacgtctggctaattttgtattttttttttttttagtagagatggggtttctccacgttggtcaggttggtctcaaactcctgatctcaaatgatacccctgcctcagcctcccaaagtgctgggattacaggcatgggccaccgcccctggccggaattgttttcttaattcattttcagattgttcactgctattgcatagaaatataattgatttttgtatattgatcttgtgtcctgcaactttgctggactagtttattacttataatagttgttatgtgttaatttgttaggattttctacatacaagattatgtcatctgtaagtagaaatagttttacttcttcctttccaatattttattttttaatttatttgtatcttgtaatttttatttttatttcctttttggtcagttgttctggctagaatctccagtacaatgctgaacataaatggcaataggaaacatccttgtcttgttcttcaccttagggaaaaattttttagtctttcaccactgagtatgaggttagctatgggttttttatagatgccctttattaggttgaagaaattttctgctcctaaattgcagagtatatttatcattaaagtgtgttggattttgtcaaatgcttcttctgaatctatttagataactatgagtttttactcttttattaacatggtgtaattgtactgattttcatatgttgaaaaaacttcgcactcctgaggtaaatcccacttggtcatagtgtataatggtgtatattacggaaaaaaaatgctttttatacattgctgaatttggtttgctagtattttgtagagaatttttgtgtctatattcataagggatatgattctgtaattttttcttgtgatgtctttggctaatactggcctcaaagaatgaattgggaaatgttctctatccttttatttcttggaagagtttgtgatggattgatgttaattctctttaaatatctgcataattcaccagtgaagctacctggtcctgggcttttctttcagggaagaattttgattactaattcaatctctttgcctgttataggcctattcgagttttctatttcttcttaagttggttttggtaatttgagtttccaggaatgtgtccatttaatctcggttatctaatttgttggtatgcaattattcacagtattcctttataatatttttttccttctgtaaggtcagtagtaatatcctgacttttattttttttattttttcttttttttttcgagatggagtttcgtgcttgtcgcccaggctggagtgcaatggcaggatctcggctcaccgtaacctctgcctcctgggttcaaacgattctgcctcagcctcccaagtagctgggactacaggcgtgcgctatcacaccaagctaatttttgtatttttagtagagacagggtttcaccatcttggacaggctcgtctcgaactcctgaccttgtgatccacccgcctcggcctcccaaagtgctgggattacaggcatgagccaccacacctggccacgacttttatttctgattttagtaatctgagtcttcttttttattctcgttctatctagctaaagttctgtcaattttatcaatcttttcaaagaaccaactttcgacactattgagtttctctattgtttttctattatctatttcctttctttccaccataatctttatgatttccttccttttgtttctctgagtttagtttgttcttcttttctacatgccctttattaagttgagaaagtcttttttcctgattttatagagtgttttagtcatgaaagggtattggattttatcaacaaaattggtgatttgaggttattgatttgagatctttctttttttctttcctctttttttgtaatataggtatgtatagtgataagtttccttctaagcatgtttttgactgcatttcaagagttttggtatggaatattctcattttcattcatctcaaactattttctaatttcccttgtgatttcttatttaatccattggctacttaggagtatgttgtttaatttccacatattgttttactttcccaaatttccttgtgttactatattcatggtggttgtgctaaggatgataacatgcatctctaacttagcacagtctatttacagttaccatggtacaatgaggccgaggttgggaggattgcttggggccgggagttcaagaccagcctgggaaatatagcaagaccttatttctaataaataaatcaataaatcaaattgcactatttcatataaaatatgataaccttattacattaaaatttcacttaccctctcttttgctgttcttgtccatttactgtggttgtatttaacgtctgcatatatagtaaccccacagtattatattattatatttgttttaaacagttattaaaccttgtttcttttttttttttttttttgagacagaaacttgctttgacacccaggctggagtgcagtggcatgatcttggctcactacaacctccgactcctgggttcaagccatcctcctacctcagcctcctgagtagctgggaccactggcgtacaccagcacatccagctaatttttgtattttttgtagagacagggttttgccatgttgcctaggctttctcaaacttctgacctcaaggaatcctcccacctcagcctcttgaagtgctgggcttacaggcatgagctaccacgcccagccaacatcagagtctttcaaaactttgtgtttctcgtggcttttattcccctttctactgatgccctaaacttagatcatatccaccatttggttaatccagcgctaccctgtctccagttactttttttttttttttttgagacggaatcttgctctatcgccaggctggagtgcagtggcgtgatctcggcttactgcatcctctgcctccccagttcaagtgattctcctgcctcagcctcccaagtagctaggactacaggcacgcaccaccacgcccagctaatttttgtatttttagtagagatggggtttcaccatgttggcctggatgatcttgatctcttgacctcgtgatccacccacctcagcttcccaaagtgctgggattacaggcatgagccaccgcgcctggccacttttttttttttttttaagacggggtctcgctctgtcacccaggttggagtgcagtggtgtgattttggctcattgcaacctctgcctcccaggttcaagcaattttcctgcctcagcctcccaagtagctgggattacaggtgctcaccaccctgcccggctaatttttgtatttttagtagagatggggtttcaccatattggccaggctggtcacaaacgcctgacctcaagtgatctgcccaccgtggcctcccaaaatgttgggattacaggtgtgagccaccacgcccagcttccatttacattttttaaaattttgttcactctgtctcctaaagctaaaaatgtattaggatcaagagaatgagaagacaagccactgacttggagaaagtatttatataagacgtatctactaaaggacttttatccaggaaaaaaattgcaaaaggttggctttgagatctacggtccccatctcagaaatcctccaattagcttcctcagtcttttataactgagatcagaataagaacagggagagggagaagaagaaacggaaagacaagaggcacgctcaattattagctgctttacaagtctgccagtcactctaggctgccctgagaataccctcccagctaatcgctatctgtgcggaaagccaggctgctggaggacaaagtgccccaatgggccaaatgggaaaaagcccacatggcctgacccctgtgccaaaagctcagccactaaaaaagggactgtcccaagagccaaaagtcccccacagaccccgatccaataatggctttgagcagaatggctttctgctctgactggctctcagatctaacatcatcatcaaagggacagagacaagggcaaccttaaatgtagcagggaggacagtgaattttttattggatttgggagcagcctgctccatgtttacctcccctgggcaactttcccctaaatcctgtgaggtaataggggtaaatggcacccctctcgtcagaaattttacacctgatttatgttgtctgtgggaccaattactcttttcccatcagttcctggtaatgtctaaatgtaccacaccccttttgggcagagatatactctctatctgataaaggacttttatccaacatatacaaagaactcttaagctgggcatagtggctcccgcctgtagtcccagctactcaggaggctgaggtgggagtattgcttaaacccaggagttcaaggctgcagtgagctaggatttcaccactgcactccagcctgggtgatagagcaagagccccatctcaaaaaacaaaaacaaaaacctcttaaaactctacaataaaacaaccatttaaaaaatgggcaagaggtctgaacagacacctcactaaagaagatatccagatggcaaataaacatatgaaaagatgctcaacatcatatcatatgtcattgggatgggacatattaagacaacgatgagatgccactacacactgtgaaaggaaaatatcttggggctggcccaaaaatcactaagctaaagggaaaagtcaagctgggaactgcttaaggcaaacctgcctcccattctattcagacacccctctgctcactgagataatgcgtatctgaatgcctcctttgaaggggctaatcagaaattgaaaagaatgctaccatttgtctcttacctacctatgacttggaagttccctccccacctagagttgtcccacctttccagactgaagcaatattcatcttacatatgttgattgatgtcttctgtctccctaaaatgtgtaaaaccaaactgtgctctgactacattgggcatacatagtcaggaccacctgaggccatgtcacaggtgtgcatcctcaaccttggcaaaataaactttcttttttttttttttttttttttttttttgagatggagtctcactctgtcacccaggctggagtgcagtggcgcgctctcggctcactgcaagctccgcctcccgggttcacgccattctcctgcctcagcctccctagtagctgggactacaggcgcccgccaccacgcccagctaattttttgtatttttagtagagacagggtttctccgtgttagccaggatggtctcgatctcttgacctcatgatccgcccgcctcggcctcccaaagtgctgggattacaggcgtgagccaccgcgcccgaccaaaactttctaaattaactgagacttgtctcagattttcgaagttcacattttggtaaccacagagggattctacgtggaggtgcccctgacctttgacaaatctcctattggtgcttggcaccagcttgagctatctttatggctcaaaccaataggacaatttgctgaggcctggaagcacaccctccagagaatctctgatttcccaatatttgattgagatctaaagtttattttgctgtgcaactcttttttggagttttacttgcttccaacacaaggaaggcaagtttttcctgcttccatgacgatggaaagcaggtaactcctttatggagtttcagctcacttacaacagggaagatgaggttatttttttcctgcttctaggatggtagagagctgtcttcagcctgagacccatccctaggtaagtaactgaattggggtttctcttggctaaatttaagattaaccaccagctggtgtggtgaggggagaaaaacagccagcagaagaaaaaaaatgtggaaaaattttgactactaaggggctttatttacataacaaggccaccattttgctagccaggctgaactgaaagagcaatggctgtacttctgaaatagcagcaattgtcctcactgaaatatggtaataagatttaaaaagatttttttaaaggagctcaatagttaaaagtcaccattaatttaaagctaacatccaagatgtgtgtgtatctgtgcatatgtgtgtttatatttcaaaggccttcatatttttgttttgtttttcttctaggaccttgtctcttttttgaacaaaagttttttcttctcagttgactgaattcttcatttacttctgctatctctcctttctcttgcaccctctgctgtatgagggacctaaaatagcttataatagcctggagttccttaaagcaaacggagaaggcaccagactccctttaggggagaaacctgtttttccttatggaatcccaacagtgtaaacagacaagtttgtctaagcccttaaactgcttgcttttgtatggtgttacctgatttattgactaaaatagttattgcaacagaggctactcttgggtttttaaagaagcatggggtgtagacacttaaaaatgtctttgttacaaaaaaaaattttttaagtcccctgtaaaaacatcacgtggtttagcctaatagtaattctccctttttggagacccaggattcagtgtgggctctgcccagagatccaggtaaaagacaggtaagacctatctaaataaaattggtctccttgtacaatcctatgatacgtttttataattttatgtttgatctggcatccatctttaatcttcctctagcacaccagactttttctctccataccttatgatgtaaattttgctatttgattttcaactgagttgtttcctttaatatgcaaatttaaggctacttaactgacaactgcctagggctgtgaaacaggttatcaagaatctgaaagtctgaaatagaaaaaaacaggtttttatgaatctataaaatgtgcttctatttgcatgcctaatatctctatgtatgtgtgtgttgtgtacacaatgtttcactgctgaaaatatataaaagagctctaattaattgtcttaagaaaataaaagtgtttgaatcaaatactttatcaggaaaaaagaaaagactagtcaaatgctttttcaagtttacataccttaagtaagtacaatcttttttttttttttttgaaagagagtctcgctctgtcacccaggttggagtgcagtggcacaatctcagctcactgcaggctctgcctcccgtgttcacgccatcctcctgcctcagcctcccgagtagctgggactacaggtgcctgccaccatgcctggctaattttttgtatttttagtagagacggggtttcaacatgtcagccaggatggtctcgatctcctgaccttgtgatccgcctgcctcggcctcccaaagtgctgggattacaggcgtgagccactgtgcccagccaagtaaaatctttaataaataagctagttttaaaattattggtaatggtcaggcgcggtggctcacgtctgtaatcccagcactttgggaggccaaggcgggcagatcacaaggtcaggagatcgagaccatcctggctaacacagtgaaaccccgtctctactaaaaatacaaaaaattagccaggcatggtggtgggcacctgtagtcccagctactcgggagactgaggcaggaggatggcgtgaacgcgggaggcagagcctgcagtgagccgagatcgcaccactgcactccatcctgggcgacagagccagactccgtctcaaaaaataaataaataaatttaattattggtaatttaatattagaaatgtcttaagaattgccagcatacatctttttgtttgcatttattgaccaagcaatttcatacttatccctgccaaatactacaaggtgtcaaaatttgacatgggggttacaaaactataaagccagcccaaaacataatgacctttgctcatgtcgtctttaataaataagacactgacattgatttaataaaaatagctgcatcttgaatttaataagattaccatacttctatcttgtggctttaggtggtctagtccacaggcagtaaggtgtgttttcggaaaggactgttatcatcttcgtttcaaagtgaaactataaactaagttactcccaaagttcaggaatgaacaaggacagcttggaggttagaagcaagatggagtccattaggtcatatatttttcactgtctcagaattttgcaatggcaagtttcataactttaaatgatgactattgcagttttcataaatctgggtaaacaattaaaatagataaatgtaatgggataaatacttgcagacaaacttgtcataatttagaatctaaagttaaattaaataataggtatatcattatttgggtattttccaattaaaatatattgtaggaaaacattctttctatttaaaaaaatgtatcctggccaggcagggtggctcacacctgtaatcccagcactttgggaggccgaggcaggtggatcacctgaggtcaggagttcaagaccagcctggcaaacatggtgaaaccctgtctctactaaaaatacaacaattagctgggcgtggcggcaggtgcctgttatcccagctacccgggaggctgaggcaggagaatcacttgaacccgggaggcggaggttgcggtgagcagggatcacgccattgcactccagcctgggcaacaagagcaaaactccccatctcaaaaaaaaaaaagtgtccttttaaaaaaggtgaacaatttttatctgatttaaagtttatttaaaggtcatgtataaaacaaggtaaaaggaacaaagaaataagagagatgtaaagaaagttatgaaaataaagagggttttttggtaatcatttaaaaaagcttaaagagaaataatttcatatgagaaagaatcttgtgtggtaaatttagtcctaaagtaaaataactggttgtttaagaaagggatgttcaagacaaaccagaaagtccaagcatgtcatgaatggtctgtataaatcacaataagaggatttataaaaacaaaaaaaagtttatatgatcaagttgtcatattattattaagctttggtttgcttagggaaaaaattgagaataaaatttgtttaaattaaggttattacatctgtgtatctctctgtatgcccttttaaagtacttgtgacattgagttacagggctttgactcctgggtccaaaaagaacaccaagtcttgctaaatcttaaatactggcagcaattaaagcctcatcttcaggcccaatagaagatgctaatcaaaacaaactgcattcctgagacacagggccagaaattaaagctattcaactcctcaaggcccagggactattgcagaagaggtgggcatgtgagattgtaagggctgattttgagagataaaataagttcagtttctctataaattaatcattaatgtcaaaggcacactgatgcaagaccagcatatgggcccctgtgtcaaattaacaaggttttcttgaagcattaaccaactccttattaaaggttataaaggtttatggaagttatatcttatggtcaagataaaaattttatagattgcttataaaattttggaaaaaaatttaattgtcttcatgccgtttttattagggcttatcatttggaaaattaagtctcctgtctcaaagaatgaaggtttttgcctttttaaaaaatctttgaattattactttggttaaatgaatgacttattttacaatggcctgggatcctattttgtaatatcaagtgttttaaacttttggtatttgacaaagtttccaaaattaaatgataaattatctctttctgacctaagtaactctttaagatattaataggttccctaaagtccaaaaatgacatatttggcttacttggtataaaaattatacaggaagcattgacaaatatgaaatggtgtttggttttctttgggctgtatttgtataaatatgttagtcatatatgttccaaaattatgggaaactcctataatactgatatgacttaatgtatgttatcagtaataattgttacattaaagtattacgtgccacagaagtgacagatttcctgtcaattgtgtctttgactatggctgcactaaaactttttgtcatccacagacaatttttgtcttgttttggtcctctttagaaggtggttttataatcagctataaaactctaataggtgctcttgaatgcaggtttctgataactttggagattgtgacatcagaattaaggaaaaactttcagtactcatggagagcttaaatgttcatgaatatcacgcagaacaggaattcactgcatagactaaactaatagaagtctgaagtaatctttttaactttttgcttaaagtgttgctgatcctttgtttcgtttttcagaatgaagaaaacttttcttttaagctatttacagcttttaacaattgagtatgcacccatgaacaaaatttggagtctatttgtttctctctacctgatttctacataatttggaaactgtgagtgttcttaacttatgacaatacagttatttgcataagtgcaataagaatctgttttaatttgtaacaggacacaactggagaaactagttattttactaaggctttgactggaatggtgtgctttaaggaatcaaacttgacttatagagccagtaggaaccccttggaaaaactggcctcatacctttgtctacagttcctgtacagggtttctgacctgtgataagtaaagaatgtcactttctgacaggcccaggagcaccaagtttatcttggaaccacaagaggagaggaatcacccaactcataggtatttgatggtacaaatccatggccacgttcagcttttaaaaagtcttatctgagattccttctatggaacaaagttccatcaaagccaatttaaaagcctatgtaaaaaaaaattatccttgctgcactatatacaaataattaggccaagtataataatgcaaatcagtcccataatgatctgtctttagtaaaaatgggaaactggagagagaaaaattgtttcaaaaactatagtacacatgttgctagattctaatcttgcctaatatttttcatttttattattttttacagtttggactgaattctaatttttcttagctacaactcttcaaaataatgtttccattatttttcctttttccccatttttcataatttggagtcaataaaaactaagctgtgcttttgtaaagttgtatggccaggcacagtggctcttgcctgtaattccagcactttgggaggctgaggcgtgtggaccacttgaggtcaagagttcatgaccagcctggccaatgtggtgaaaccctatttctactaaaaatacaaaaattagtcaagcgtggtggtgcatgcctgtaatcttagctattcaggaggctgaggcaggagaatcgcatgaacctgggaggcagaggttgcagtgagccgagatagtgccactgcactccagcccggatgtctcaaaaaaaaaaaagcagcagctccttacccatcagtccctctgcagagcagtcagtgactattattacgtttcatgcatgtccttccagaacatttttatccatatcctacatcaggagcctttttttttttttggaaaaagtctcactcttgtcactcaggctgaagtgcagtgacatggtgacagctcactgcagcctcaacctcccaggctcaagtgattctcccacctcagcctcccaagtagctaggactacaggcataccaccacacccaaggagcttccttttaaaattcaaatgagaaataaactctgtaagtatataatgtgctataatttactttttcacttaattctgcacctgtttctttatgggacatagtggttgagtacaagttctggagaagacaacctgtgtttgaatcaggctctttcattcactgtattcataggcaaggagtttaacctctgtgcctcagtttcctcttctgtgaaagggagaaaataacagtacctatctcctaagttatgtaaatgaattaatacctgtaaagtgcttggaaaaacagctggcacatagctactgtcatttctactctccaaagcttccttgtgataattttcttgtctccagctgtgggtctccatctggggccacagtggcagtgatggcttctcctatgctgatggtggccaggccaacatgatggtagggatagtcagggctggtcagggcattctggtcctaaactactaattccttgcccctaaaccaactgctctgttgcaaagcactggtatgctcaaatggctcacattacctgcattccaagactttgagctctacagctctgcttaccccaatgtaccctacaaatatcattattttattttattttttcaagacagtctttgctctgtcatttaggctggagtgcagtggtgcaatcatagctcactgcagccttgacctcttgggctcaagtgatcctcccactgcagcctcctgagtagctgaaattataggcacacaccaccaagcccagctaatttgtttctatttttctgtagagatgcggtctcgctatgtgcccaggctggtctggaatacctggcctccagcaatcctcccacctcagtctcccagtgttggaattacaggcatgagccactgcaccctgtccagacattaccttaattgccaattttttttttttgagaccgagtttcgctctgtcaccaggctggagtgcagtggcgtgatctaattgccacattttatatgatgaaaccctgccaaaaccctgtaaatggtgtctctaaatctggtcccttatcatgtgggtttgtgttactgcaaggttaataaaatgattgaggcgagcatctgcagaagacaggaggcaaacaccattcccactatatcccaactgcattcctctggggtttcactgtgcttattttcctgtaatctctcactaatccatctgtgaatgacttctctctcctgttcaatttaataaccccacaaaactgggttgggtttttttgttttgtttttgtgacagtctcactctgtcgcccaggctggaccacggtggtgccatctcagctcactgcaacctccgcctcccaggttcaagcaattctcctgcctcagcctcccgagtagctgggattacaggcacccgccaccatgcccagataatttttgtatttttagtagatagagacagggttttgccatgttggccaggctggcctcatactcctgacctcagtgatctgcccaccttgacttcccaaagtgctagggttacaggcatgagccaccacacccagctgctgttgtcttaatataacctctttgaaagtgggatcatttgttttaagtggctagagcagtgggaagaaagctatgtcaattcaacatcagaagacacaacggttaggagacaatggatgaatgtagtcagcagaaatcttccaagccctacaagataaaagtatctctgatgagaaataggtgactgatttcctcctacccaaagatgtaactagagtttaaatatggcagctacatgaaatgtggcacacattgtttgtaacagatgaaaataaatttaaaaggatgggatgcaagttctgctgaaaatttggagcaggaccttaggcaagtcacaaaatagaaacataaataataacatctcatgcgcacttaacgatgtacaaggtcttgtgctaactgctttgcatgcatcatctcattccgtcctcaccacactactgttggtgggtacattgatgaggaaattgaggcttagaggggttagaacttgcctaaggtgaagtgactaagaccaaagcagaatttgcacctgggtcatcactgtggcagccacattctaaccactcaccatctctgtgatgtcatctcctcttgagtctgttgtctcagaagtaaagtggagggtggggcttctttatttggaaggtggcttctggttttaacattataagaccttccaatggccataagatcgggtgcctaaattccagttgagactcactgtttagaccactgcattatttcctcattgagtccatcagaacacgggagatcccagcagtagatccttaagtcatttaattaaaaaaaaaaaagaacacgggagagacatattctcatggctatcacattctcatgggtacacctggttgtttcatgcactgggtgttgattgcactcttatatttaggctgtgaacctttagagtgaacaactatttgaggcaggatgcaaatacccttttgattaaattaatgtaacttttgcaggctgggtgcggtggctcatatctgtaatccaagcactttgggaggccgaagtgagcagatcacttgaggccaggagttgcagaccagcctggccaacatagtgaaacctggtctctactacaaatacaaaaaaaagccaggtgcaatggcgcacacctgtagtcccagctgctcaggaggctgaggcatcaaaatcgcttgagcctgggaggcggaggttgcagtgagctgaaaccgtgccactgcactccagcctgggtgacagagcaagactctgtctcaaaatatatataacttttgcaaagtgaaatgaatccatcataagaataccccatgctaataactcagtcattattctttttctgaatattaatgagttgaactttattaatcaccctcttttgagtctgattagaggcttaagagtagatcaatacttctgcacatctgctgtgtgccagggtctagtctagcatgattttaatttttcactataagtctgagcatgggttaggcccatgctgcaaatgaagacactcaccctaggtaacctggctcagatgtggacccaaatctgacttcaaaacctgttttctttccacgatgtcagtggttctccaagtgtggtctatggactcttgccctcaagacccttttagggatctgcaaggtcaaagctactatgattatgttgtcttttcacagcattgatgtttgctctgatggagcaaaaccaatacggaatgaactgctgcacttcagcataaatctgctagtgagtggcaccactgggccacgcactcatagtaaggggcaaagccaactgcccttaatatccttgatagagtaacaattattaacattattaagtcttgacccttagagacacaccttcataagaatacataagcacttctgcattccataatacaatggttgtctcaaggaacagcacttatgcaattatttgaattgtaagctcaactagccacatttttcatgaaaataccatttttacttgaaatactgacagaaaacttgtggtcattcagacttggggattggtatacattttcttttttgagacggagtctcgctctgttgcccaggctggagtgcagtgacacgatctccactcactgcaacctccacctcccgggttcaagcagttctccctacctcagcctcccaagtaagtgggatcacaggcacgtgccaccacgcccagctaatttttgtattttttagtagagatgtggttttgccatgttggccaggctggtcttccaaagtgctggaattacaggcgtgagccactgtgcccggcccacattttcttgacaataaagtgagccacttaattcaagaacaaacagtatttgttgccaatgaaaaactgagctttcaagcaaaaattagaattttggaaaacttgtatctgccatcgtgagctgacaacttcccaatacttaagactttcctgataagatcacatatttggcaatattaacaaatgcaattttaaaatatcgcttaattaaatgtgtcaagatttagaagatgacaggtttccagcaagttctgctggtgcagtatcgtggtgactcctcatgtccttcagtgaggtagagccatgccttcccaaaggagtctgctcacagcctgagggcagagtctgggggctcttccttgggtgtatatctcagcccccgggtagtagctggttcttgtatctgctattcctgtattttgagttctctttacttcttactagccagttcctcatcactccgatcccagtgagaatcaggaattctttatattaaactcttcctgtttggatcactatgtggtttctccctcctgattagacctacactgacatagcaggtcttgtaagcaagagctgtgaacagtcaagtggggagaaaaacacatcagtgcattcattacaatgaagcgaagggcacaaaggagaggtacatgttcctgcctgtcttggtttgtgaactgcaaaaggttgtcaagctgacattgggggaagaagacttaaggaaaaagtttgcaacagctgctgttaagtataaagaagtggaaaattagaaccaaatggtatccacgtgttgagtgggctagttcttttgcctgtgaaaaagagtttttgtgatgtcatcccttcggaacagttgagggagcagaaagtgaatgacccaacaaatccagacttggaagtagctaaaaaggaaagttagcaggtaattaagttaccaccgcagtgcccaacaggaggacagcaaagaagagaccaactgtatcagtgatatggttggagttggagaacttaagcacttcaagacaacggaaaaatagtggctgggcgtggtggctcatgcctgtaatcccagcactttgagaggccaaggcgggtggatcacccgaggtcaggagtttgagatcagccaggccaacatggtgaaaccccgtctctactaaaaatacaaaaattagccggggcgtggtggcgggcgcctgcaatccccgctactggggaggctgaggcaggagaatcacttgaacctgggaggcagaggttgcagtgagccgagagagatcatgccactgcactccagcctgggcgaaagagtgagacttggtctcaaaaaaagaaaagcatcgctggatgtaatgcactttttgtttttctattctattgtattttatttttcaaaatgctggtcatggtccccctaaattgacttcataatccttcttggggactctattcatagtctgacaaacacaacagaggaaaggagtgactcataaactgataataatctgagaaaaacacaccctgaggtcaaaattttcctttggtcaatgttcactagttatcttaatttgttttccaaaccctggaaggcaactgtgctacacagaaccccagtgccaagatcccaccgttcacattactctcatcctttcgggagtaatacttctcattacaaatcaataaatgcacattttgaaacacattcatgtcatgcaaagtaaaactggccagcatctccactggcacagtggctcccagatcagatgaactccactgaaccaaactttgcaacatcagactcatcagtcaaagcaaaccttcttattacagaaaattgtaatctctcacgttattgtaaaataagacaataatttgcaatactcaacatgataactcggtagagatgtttagttcaatatgattttatttaaaaatgtgtacagctgaaggagggatctgatcttttgttaaatgaaaccaattttcacggtatatatttggccattttagcttcgtagtgaataataacagaaaaggaagtttctgttcaagatcctcactccagcacactcagccaggtgcctggcaagatgacacatttcctggtctgaagctcacagccaatcctctcactgaagtgaaacaccaattctccaggcatacacacacatacgcacatcttattttcactgctctacacagggacctgagaatccttaattttaaagttgggaaaaacgtgaaaggattccttaactcattgtctgcgacaaatccaactacctgttaactcttaacaattgcaagtataaaatacttgaaatttacaagatgctccatttaatggaacaactcaaatgctaaaaaattaggtcaaataacatgctttaatatttttaaatgttacttaaaacttattgagacaagatacgcagcacattcttggtattataaactcctactgacgactgctacttgatggccaaaaacatttaaagaaagagaagaaaccatactggtatacaacaatatctgcagggaatgtcatgttttacattttgttaactgaaattaaacctgacaaaaaaaccaaagatctacaaaaccgacacccatgtcattttaaatgatgaggtagattgtttcctatgcagtaaagtgaagataacaaaaaaatccatacaacttccaaatcctctttaaaaaaaaaaaaaagtttgggttatagtcactttcacaaacaagacattcataaactataaggtggagaggtcatactcaggcaggttctgtacttgatgtgttacttggagattcaataatcagtcttgggtcaatcaactctttccaaaatacagtgatctgaggaaaaagacaaaatacccagtttaggcacttcattttgaggtcataccggttaattcagccacgtaaattttccgtctgtgtagaatgattgaagaacgggaataatttgggttccaataaactgagttcaattgcagtatagtaactctttaggccaggcgctgtggctcacacctgtaatcccagcaatttggaaggccgagggggagaaatgcttgagcccaggagttcaagatcagcctgggaaacctagtgagaccccatctctattattttttttaattaaaaaacaaaacaaaaaaaaagaggccaggcatggtagctcacgcctataatcctagcactctgggaggccaaggcagtcggatcatctaaagtcaggagttcaagaccagcctggccaacctgtgtctctgcaaaaatacaaaaattagccgggcatggtgacgcatgcctgtagtcccagctactcggaaggctgagtcaggagaatcgcttgaacccagtaggtggaggttgcagtgagcggagatcgcgccactgcactccagcctgggtgacagagtgaaactctgtgctgggaaaataaataaataaataaataaataactcatttacttagaatgaagctaaattttacattaaacatatttcatctttctttgattaagagcaggagatgcaggggttgcgggagggagtagctcccccaacccctgcatttgatttgccctgtggacaggtggcctggagaccttctggcaactagacatggtccagatgggtatcattaggctgctgatgcccttttgcgccgctctgtagttcttatcctacactacctaaaaacaggaactatttcacagcccaccaagagaaaaactctaaggcttggtcctatgaatgaataatgagggccatctagtgtcaaaaaaggtaattacaggctttttgtttttgagatagggtatcacgtctatagtccaggctggaatgcagtggcattcaggactcactgcaccttccacctcctgggctcaagcgatcctcctgcctcgcccccaccacccccaaaggtggctgggactacaggcatgtgtcaccactcccggttaatttttgtatttttttgtagagacggggtctcgccatgttgcccaggctggtcttgaactcctggactcaagggatcggcccgcctcagcctcccaaagtgctgtgattacaggcatgagccacggtgcccagcctaattacaggctttctattctacttcaagtctctgtttagggcatagagagaaaagcctccaaggtttaattttccaatgcggtttccaatttcaaccaaaaaaaactattgcaaataaagaaatacaggagaccaggccaaatctgctgatcctaccacaaacactaaaaatgtgtttctggaataaatccctaaaagtgtcatctaccttaaagacaaggtaaaacacagtctggctagggtttctacaagttcacacttcagaaaaaatatgtttgcaatattgaaacttacagaataatatctataacatttcaagtataaacaccttaaaagagagcattttcttaaatctaacttccatttaatgccaccataacctaatgagctagccactgccagcaactctggtaggtctggctgcttaaaaaggtataaatcggccgggcgcggtggctcacacgtgtaatcctagcactttgggaggccgaggcgtgcagatcacgaggtcaggagattgagaccatcgtggccaacgcggggaaaccctgtctctagttaaaaaaatacaaaaaattagccaggcgtggtggcaggcgcctgtaatcccagctactcgggaggctgaggcaagagaatggtgtgaacccgggaggcggagcttgcagtgagcggagatcacgccactgcactccagcctgggtgacagagctagactctgtctcaaaaaaaaaaaaaaaaaaaaaaggtataaaccatatacttcccaaaatggcaatttaaggatttaaagaaagtcagaggatgagatcatcattttatgtcactcttcaaactgttgtgctattataagttggaactctcgggccaggcatggtggctcacccaggcacggtggcctgtaatccaacactttgggaggcctaagtgggcagatcacttgaggtcagcagttcaagaccagcctggccaacatggtaaaaccccgtctctaccaaaaatataaaaattagctgggtgaggtggcaagcgcctgtaattctagctactccagaggctgaggcatgagaatcgctcgaacctgagaggtggaggttgcagtgagccaagatcatgccactgcatttcagcctgggcaacacagtgagactctctcaaaaaaacaaaagttggaactgtggtaacacttgggggatagtggtgacagcaaggggacataatagaggcttctgggagtgggtgttatgttctatttcctgatctgggtctggttacatgggtatgttcatgtgaaagttgttcaagccatgtagttatatgcacttctctgaacgtgtatgccaataaagtttctaaatatgctaccctttcctactggaatccttatatagctataattttaaacaactgtacactcttaaagaaaagtttgttatttgtgcatcttgtcacataggctctatgagggccaagatggcgccctgatttggcactggtattgccacaccataagaaggtcagattccccccagggcctgtagtgcaatgtcaccttccaaaccacaggtaattggtcaagagagaacgaatggccaagcaacgcaagaagagaagcacacctaccttgctctcctgtgtcacagcgtactccactacctcggctccattttcattgtgataaactaaatcaaatttcccaggttctctcaaggctgaaacaagaagatagggaggaaagagagtaagtcatttttcaatagttaaaaatgttcctctatggggaatttatatcattaagaaaacaaccacaaacaaactgtcaattaatgtgaaggctgggtatgtacaggaaagcacagggtgctcaatactgggggatcctgagaaaaactctggaccagggggacttctcagccatttatcagagaaaatctttccttcataagcttgatgaactgtcattagtactaccagaattgaatatggcaccacaagataatccccaaaattaattaatttatgtgtttcaacaagggaaggtaatatgaaatgctgctctgtccttagaaatcacatatgcttcctactacttggtaacacaggcagtcccccttttttttttaagacagagtcctgctttatcgcccaggctgtagtgtagtggcgcaatctcgactcactacaacctctacctcctgggttcaagtgattcttgtgcctcagcctcctgagtagctgggattacaggcatgcaccactatgcccagctaatttttgtatttttagttgagacagggtttcaccatgttggccaggttggtctcaaacttctggcctcaagtgatctgcccgcctcggcctcccaaagcgctgggattacaggcgtgagccaccacacccggcctcagtccttgctttctatggtaaaatgggattggaaaaatgactgtgcaagctgaaaccacgcaaaacaatcttaataatcaataggaaaaattattatcgtcttacgagttttaaaaaattttgccaaaacattaaaaacctttactacatagggaaattaaaaaatagtaaaataaatatattgtacttatgagtacactgtaattacattaggaacactaagaactaactttctttttctctttccttctacacgttttatttctttgtaagaaacttatcagggggagtttgaacagtgcttgtgttcttgccctgtaacttacaatacagagcaagcatcttctctatgctttgtgcaactgttatactcttttctaagtttgaaactgctttctacattttatcctttgaacttctaatgtcgtgaaatagctcaaagaatttgttttttactttgtaaaatctttgtttttgctggtgtcactttggggacattttcatcctttttgccacaaccactttcctcatttatgtcaataagttcacctcactggcagtgtcaacattcctacagtgagctatttcttctacagactctccttaaactcagtttggatggcactttcagcattaccacttttgtttctttgctgtgcctttatctttgtgggccaattccctacttcgattatacgtgttgtaaaatgtcatgcaggtttataagtgagagacaaggaggcaccacaactgcatgctctgctctgtatgtgaactgaataacagatgcacagtgaccagtcactgacggactctgaaagtactgacttgactggtaatggatcatgacgcgtatctgttatttatgttatatagtgatatgtggactaaagagctagcagtacttcatgcacttacagttaacatatgcaatgttgctgggggactagtattacttaactaaaccagggtaactgaaatatatgtatatcagaaccaccacatcaaggacaagtgacattgctattagagaacagataaatccatttctttctttcttttttgcttttgagacagggtcttgctcactcagcctggagtgcagtgacgcaatcatgactcactgcagcctcgacctcctgggctcaagtgatcctcccacctcagcctctcaagtagcgaggactacaagcatgtaccaccacactcagctatgttttgttttttttttttacgacagagtctcactatgctgcccaggctggtcttgaactcctgggctcaagtgatcctcccaccttcgcccccgaagccatttcttgatgccctaaagaagaaaagttctaagtggatgtcatcactattaatcacctgacaagcactgatcaggctgtatgcacagaatttgacagtggacaaacttttctgtccaccgttcctaagaaaggggatttctataaatgaaatctcatcagaagaaaggttggaaacctggccaggcacggtggctcatgcctgtaatcccagcactttgggaggctgaggtgggaggatcacgaggtcaggagatcgagaccgtcctggctaacacagtgaaaccccatctctactaaaaatacaaaaaattagccaggtgtggtggcgggtgcctgtagtcccagctgctcgggaggctgaggcaggagaatggcgtgaacccgggaggcggagcttgcactgagccgagatcgcccactgcactccagcctggacaacagagtgagactccatctcaaaaaaaaaagaaaggtaggaacccagtgtaagttatatataaacatttacttaatatcataaacgaactttgttcaaaaactctttcgactgatttctgttagctgaatcttttattcaatcccttatctaaaaataaacagaaggccaggtgcggtggttcatgcctgtaacctcaacactttgggaggccaaggtgggtggatcacgaggtcaggagatcgagaccatcctggctaacatggtaaaaccccgtctctactaaaaatacaaaaaattagccgggcatggcggccagcgcctgtagttccagctactcgggaggctgaggcaggaggatggtgcgaacctgggaggcagagcttgcagtgagccaagatagcgccactgcactccagcctgggcgacagcaacactccgtctcaaaaataaacaaacaaacaaacaaacaaacaaacagaaaacaggctgggcacagtggctcacacctgtagtctcagcactttgggaggccaaggcaggtggattgcttgaggccaagaattcaagaccaacctggccaacatgtcaaaatccatctctactaaaaatacaaaaattagctggacatggtggtgtgtgcctgtagtcccaactactctgcaagctgaggcatgagaatcacttgaacctgggaggcggaggctgcagtgagccaagattgtgccaccacactccagcctgggcgatagagtgagactctgtcaaaaaaaaaaggaaaacaattaattgctttaggatcttctaaaggaaaaggaatctcccctgccctctggccagggacccctacagtacaccccaagttaagctacatattataaaagccctcttattccacgcattcagttccagtaccaggtggggttcatcagagataaatccagcaaccatttaaaatgatatgtgaaagtgtatgtatacacacacttcagacattttgttttgacttaatatacaaaagtatattcatttgacaatcttttgaaatagagctgagtaggtcttatgagttcactgaatagagctctttttttaataaaccataccattgtattgtctgcaatttccacaatttacagtttgggggtttttaaaatattttttgagactaagtcttgctctgtcactcagtctggaaggcagttgcactatctcggctcactgcaacctccacctcccgggttcaagcgattctcctgcctcaacctttccagtaggtgggattacaggcgtgtgccatgacgcccggctaatttttgtatttttagtagagacagggtttcaccatgttggccaggatggtctcaaactcctgacctcaagtgatccaccaaccttggcctcccaaagtgcagggattacaggtgtgagccaccgtgcccagcctgggtttttcttaaataaggcaagattgcaaaaatttgcaaggcaatctaagtgcagaatcttcctcagtttttacaaaattcctcccaatcttttatagctgacccactcatccataatttcatagcatttcctgagtcagcattcaacttaggcttcctaggaataattctttttataatcgattttcatcagttcatataatcttttatgaaattatataattacagtaataagaactagcccaacagctttggaatatatccaacatctcttatgagcccccagggctaaagtgtgctgaaagaagtggggagcgccagttatatggaggccaaggaagagaacatctcctgtgtataaaagctatttataaaccactgtagatagagcctacattttcaaattattttctaaaagactcaccaggtaaggatgaaagaatttctatatctacttgctgggtctctggattgtggcttaatattcttccttcctttcaaaaataaaagtccaagtcaaaatcaacatgtaaaacactgtgaatatactaaaaaccactgaattgtagactttaaaatggttaaaatgttgaattttatgttatgtgaattttatctcagttgaaaaatttagaaataaatccacatatagagaaaataaaaacaggtggactgataaacactttatgtgaatatacagaaatatctttagaggcaaaataaaacatttaaatcataaatggcagacactatcttaaataactcgatgaaagtaaagattacaccagggaaccaaaagtgactgaataagggaaaaggagaaaaaaatcacaccaggctgatatattcaagtgagcactgaccatcacagcattcatcaggagagactagatatatcctaatggtgcagcctcggttcctgatgcttttagaacccttctaaaacagtgatcacaaccccccaggagaaaccagaaggcactttatcactgttaagatcccaattctccttctcccaggtctccagctgtgggagctgattttctaatgcatcaagaggatgcactgcccatgcacgtgggcgatggggagacacatggtagcctccgggggtatatactgagaggccaagcaaccagttcctcctgcctctacctggaatttctgagcacagtcaacagttttttttaaaaccagactcaacagggaatcaggggcttgggagactacattttttagtacagaattgaaccaatttaatttttggagacaaggttaatgaataaagcagatgatcaagctggataactgcgtttgaggtcaaagcaaaaaagtaggaccaattttcattcttaaaatgtttttgaaagcaatttcaaaaatcttcaaaaaattttgccaactaaagtaggcaaaacaccttccaacattaataactatgacaactaataccaatttaatatgcaattttttttaagagtctcgttttgtcacccaggctggagtgcagtggcatgatctcagctcactgcaacccccacctactgcgttcaagtgattcttgtgcctcagtctcctgagtagctggggctacaggtgcacgccaccatgccaggctcatttttatatttttagtagagatggggttttgccatgttggccaggctggtctcgaactcctgacctcaagtgattcacctaccttggcctcccaaagtgctgggattacaggcatgagccactgtgcctggccattaataagcaatttttaaaaatcagtatcatctagaattacaatttatagaggttgtgggatgtatcaatacaatattcatttccatttcctcatatatcacacaattaaatgttttctatggtagggtgacaaaacaccctggtttgttcaagacaggtctgtacatctttccagcataactattaatagcatccctttgactcacaagtatcctgattcaggtgataaattacatgatcacctcatccataggagatagtaagtgcctaagaagataaaaaacaaaacaccaacgacctagaactaacccaccagatcccttcattaactgattcttccagcctgcttttgaggaaagattttttttttttttttttttgagatggagtctcgctctgttacccaggctggagtgcagtggtgtgatctcagctaactgcaagctctgcctcccgggttcacgccattctcctgcctcagcctcctgagtagctgggactacaggcacccgccaccatgccccgctaatttttttttttgtatttttactagagacggggtttcactgtgttagccaggatggtctcaatctcctgatctcgtgatccacccaccttggcctcccaaagtgctgggattacaggtgggagccaccaagcccagccttgaggaaaggtttctataaagattttaagtcttccaaggcatcaatccagattaaatcaaattcccttgtattttatctatgttactatattaacactaccaattattaccttaaaaaatggtcttacattccatatagtacatcaaaaaaaagaaagaatgcactttaacaagattttcaacaaaatgttggtgggtgaaaaagaaacatgtaattctgtgatccctctgactgagtcaagcttttactgaactatgaaaaacctcacatgccaatataaagactcatacagatattaagtaagtaaattccacggataatatttatgaattacctgtggttacctgataatgcagaagaaatcatactagatcataacaaccagaagtaattcacaaatatgtaaaatagattcccatgatgaaaataatcaaatcttcttgctgagaactatttattattttctttcaaagtttagaatcatgaaggaatgaatacccaaataagttggtctaaactaattagaaaaaagtaactaaaaaaattaaactggctgggcatagtggctcacacctgtaatcccaacactttgggaagccaagatggggggattgcttgagccaaggagtttgagaccaacctgggcaacatagcaagatcctgtcgctatttaaaaacaaaaaattaatatattttttttaaaaaagtaaaaattaagctcatcattctcctactctattcttcccaagtataaggcaaataacacagggagacttcccagtgatactattaaagagttgacatttcgattaatgttttcattttctactttctggcatttttatttagtaaaaaaacaaatctgtattatccatacaagtagtattaaatatgactttagttttaataatacactgacaacttacttttaaataaacatccttaccttgtagtcagagacatcaggagagtaactggatgttagctccaaaagctaaaaaagaagaaaaaacccacaaatacataagccctcttatcctctcccattcccacagctcctccatcatgccatgttggcgtgtccaccccgaccagtctgggagccctaccaggaacccgtaacaacactggggttccagtgggaagggcttttacaaacacatttaacctgattttctaagtaagtttatttggaaggggaatgaaccttttttgctgtgactgttcttttgaaatataccttaaatgcaatcttttctccaacttgaggggcagctgctaacagtggtaacagactatagtccttcttgggtgtctctactggattctgaaaaacagtgttagtcatgtgacatcatcactggtgagaaaatgtgaatccatgacatgaactccacacacattctaaggggaaagggaggagataacttacaaaaaataatacttacctggataatagtagatgaattttttaccacgtcatttaattgctgttgcctctggttgtcagtgcttctatttacaacacaggaaacaggatgccctcgtcctcgacctctcccccgcatgccccgtcccttagctcccttccaagaaaaaaggttctcttctctaccccatcctcttcctaaactagcagggagagacacactgggagaagcaccaggagcctgtccaccaccatttgagccagaacgcctccatccagcagcacctgcagtctgtgatgacagccctgggcctggacgacctcttcctgcaaaaaggcctactgtctttaagaaacccgcagcacactccggggtgctcgatgacatcaagcattggtcgtctgactctgcactagagtctgaactggaagatgttgttccagaggtcttgcccttgctgggggtaaggctaaagccaagttttatagccagtttgtctgcagttgtatttttggtagagggttcttcctttgataactcagttggtaatttctctgaggaatttctggcctccaaagtgactttgctgggaccatcactgatagattcatcacaagattcagactccgaggaggaactgggactctcttttgagcaaacgcttacactacctttccttttggctttaacaaggctgtttctagcagaaccttttggagaactacatctctgattggcccagtctttcactgcctgtactttcggagacttgggattcttagccttttttttatattcacatttctcctttttctttggtgattttcttttggcctcttcgttatcatcacccactgtgccacaggttgctttattttttctcttgttttttttgctgacagtctgatctgtgacagcttttggttccagatccaagaccttctcattattgttattgttctctcgactcttccaatgcttctttgaatatttgcaatctggttcagtttcttcaccctcctctaactgaaatgcccgcttctttgcttttctaagagataaattaatgtcaccattactgatgactacagaattctcagcaactcctctctcttctaatttaactctgtcaaaagaacaagagagaaagctagagtgagcaatttataaacacatctccaggacatagttatatactgagatgactctacaaaatgtaactaccatcagtcaatgaaaaaatgtcacatcacttaaagacaaaagactctttctggcaaaatggcctatgtagcattactcacagtcaactttcaaatggctagttttatttattgaatagctactgcatcctaaacatttttaatacgtttttctctaatctaaacaccaacacaaagtaggtatttttaattttacagatcgcaaaattacagctcagacaagttacttgccccaaatctagagctgataagtagcagaaacgcaattcaaacttcagtttgtctaacttcaaactcacaatctttctacaatatgcatgtcacctaccctaaaaggtgataatgctgattatccattttgtttcagaatgtgggcttctttctttaataagattttactcctgttttaatttaggtgaatactaaacaatttatgttctctagggtagtgacagccatctgtacaattccacaacactctgtgaagcttaattttatgtatcaatttgtccgggctattggacgtccagatatctggttaaaattacgctggctctttccataccaccacagtggtgcacatgaatgtcttggctgatgctctcaagagcatcaacaaagctgaaaagcaaggtaaatgccaggttcttattaggccgagctccaaagtaactgtccgttttcttttttttatttttatttttcttttctttttttttttttgagacggagtcccaactccgtcacccaggccaaagtgcactggtgcatttctcagttcactacaacctctccctcccaggttcaagagattctcgtgcctcagcctcccaaatagctggaattacaggcgcctgccactatgcctcgctaatttttgtatttttagtagagatggggttttgccatgttggccaggctgatcttgaactcctggcctcaagtgctcaagtgatctgcctaccttggcctctcaaagtgctgagattacaggcatgagccatcgcacccagccccatcgtccagtttctaactataatgatgaagcatggttacactggcaaatctgaaaccactgatgatcatagagctgggaaaactgttgtgaacctcacaggcaggctaaacaagtatggaataatcagcctcagatttgacgtgcaactcaaagatctagaaaaatggcagaataacctgctcccatcccaccagtttggtttcactgtactgacaacctcggctggcatcatagaccacgaagaagcaagacgaaaacacataggaagaaaaatcctgggattctttttataacgatgtaatacgtatttacaaatatattgcctcagtggaaaaaaaattatgctgggagtatgtgcaaggttgtttctggatgagattaacatttaaattgctagactgagtaaagtacattgccgtttccaatgtgggtgggcctcatccaacccactgaaggcctgaatagaacaaaaagactgagtaagggagaattcatttctctgcctgactcttcaagctgggacatcggtcttctcctgccttcaaactcgaacttgaactagaaatataccattggctctccttggtctatagcttactaagtgaacttaggacttctcaatctccacaatcctatgagccaattccttacaataaatcccatgtctgtgagtgagtatttgtgtgtgtgtgtgtgtgtgtgtgtcttactggttatgtttctctgaataaccctacttcatccaaaatttcactataggaaagcaattttgttcctccatcaacaggcaacagctaatcctagtatgtgcagtctgatgatgatggaagtcttgagactgtcctcaatgttaagcaaattgtgagtactcaaaaatgcctgttggccaggcacagtggctcatgcctataatcccaaaactctgggaggctaaggtggtagggtggcttgagcccaggagtttaagaccagcctgggcaacatagggagaccctgtctctacaaaatacaaacatcaggctgggcacggtggctcacgcctgtaatcccagcactttgggaggtcaaggtgggtggatcacaaggtcaggagatcgagaccatcctggctaacacagtgaaaccccgtctctactaaaaatacaaaaaattagccaggcgtggtggcgggcgcctgtagtcccagctactcgggaggctgaggcaggagaatggcgtgaacctgggaggtggagcttgcagtgagccgaggtcacaccactgtactccagcctgggcaacagagcaagactccgtctcaaaaaaaaaaaaaaaaaaaaatacaaacattaggtaagtatggttggtgcatgcctgtggcccagctacctgaggtaggaggatcactagagcccaggaggtccaggctgcagtgagctgtaattgcgccactgctgaaaacacacattatacttacaaggcatttacattcagctatatatttcatcaagttttttcagtggccagggaaagatgtagacaatcatatttgaaaataaagaacaactggtgaatgataggagcatatgtgacaagcattctttaaattttttaaggcatagtaatcctgtggatttacctcaatgcggtagttgaaaaaaatcctcaattatttgtcagaaaactaactatacagacaaacaaatcaagataaaataagagttactgatatcaggagtaggagaaagagacaaataaaatgctgagtgaccagggattttaaattataaaaacacattcccctctgttcccagcttggcatctaatagcaaggaaataattcttaatctggcaaaagccagtttggcatcctgtgaatctaagaactaccatggaagcgctacaatatcagatttttttcttgacatttctgatcaatttgttttcacttgtagcaatgatccaagcttcaattctgagatgaccaaataggaccaaactttctgtcaaatgttgaaaatggttgcaagtctctgttcagtcactgtggtttattaaggccctggaaaacagcacatgtaacatccagttgatgagaaccccttcctttcctggaagctggcaacaccctcacgccttccaaaacagctcttagcatcgtctcatccattcttaagaccatgcattggccgggcgcggtggctcatgcctgtaataatctcagcactttgggaggctgaggtgggcagatcacaaggtcaagagatcgagaccagcctggccaacatggtgaaacccagtctctactaaaaatacaaaaattagctgggcatggtggcatgcgcctgtagtcccagctactcgggaagctgaggcagaagaatcgcttgaacccaggaggcagagggtgcagtaagccaagatcacgccaccgcactccagcctggcgacagatagagactctgtctccaaaaaataaaaaaaaaaagaccatgcatctacagctatttggcttgaaggtatgacctgtgattcctgcagccccactacctactgttccccaagagaataatttcagtttttaaaatattaagattataaactggtgtggtggcacatgcctgtaatcccagctactcaggaggcagagggaagatcacttgaacccaggagttcaaaactagcctgggcaacacagtgagccctcatctgggaagaaaaaaaaaaagaaaatattaagattgagaggcaaaataccatccagagaaaaagaaatggttctcctgggtctgcttagttaccattcctgtcaggtgcaccttccctggcaatattctctatttctttacctggatcacagacaaagaatagagctatccttttacaaacaaaagtgcatgcatttgtcctttcacaagtagaagtgaattacctaggtcactagtgacgaaagagttgattccaaaaaacagatccccacttttcttttttcgagatggaattttgctctgtcgcccaggctggactgcagtggcatgatctgggctctctgcaacctcctccccttgggttcaagcgattctcctgcctcagcctcccaagtagctgggattccaggtgcctgccaccacgcctggctaactttttgtatttttagtagagatggggttttgccacgttggtcaggctggtctcgaactgacctcagctgattcgcccgcctcggcctcccaaaagtgttagcattacaggcgtgagccaccatgcccagctatccccacttttcattctaactctttgcaaggcaaactgagtggtattatcaaaatctaagtccacccttaaaatctacaatttactgtctaggattctgttatgcagaaacactgacatgcccatctgtccaacctgatgctccctacccattgcctgccaaggccaacgtgaatgcctgggttcaaatgctatttctgccactgtaattttttttaaaatcattacctcagcctttctcatctataaaaatggggataatgacaataattacagtactcagtgacttattatgcagagagagcatgcctgactcagaacaagtgatatccaaatgttagctctaatttttattagtacaatgaatgttgttagtcctatcatgggtaagttggtgaatttttaaaagttgtacaagtctgtacaacttttctggaagctaatttgacagtacttatcaatttttatatgtaccttctcttagaccaatgagtatttcttctaagaataaatccaactgaataattttccaagtacaaaaaaaatacaagaatattcactaaagcactatgtagcaaacagaaaagaatgacatacatcacacactttatatactgagatagcccatgataggtaaaaaagcaaggtgcagaacagtatgttatgatatttgtagtttaaaagtataagtacatatggttgcacatgtatagaaatctggctctaagatataccccataccccaaacttaaccaaggatacttctggagagtgaggtgtgggaaaaagtatatgataaaagtagtaggaaactttttatcttggactatccaaggagccactaactacagcaatatgaaatgagaactcgtctctaatattttgttttgtttgagatgcggtcttgctctgctgcccagtctggagtggagtgacacgatcatggctcactgcagcctcaacttctgaggctcaagtgatcctctcacctaagcctcccaactagctgggactacaggcatccatcactgagcctagctaattttttttgtttgttttttggggtttttttggtagaataagggtctccctgtgttgcccaggctgctcacaaactcctggactcaagtgatcctcccacctcggcctcccaaagtgttggtatcacaggcataagccaacatgcctggcccatctctaacatttaatcaatgtgtttttttgttcgtttgtttgtttgttttttgaggtagggtctcactctgtcgcccaggctgcagcgcagtggcaccatctcaactcaccgaagcctttacttcccaggcttaaatgatcctcccacctcagcccctcaagcagctgggactacaggcatgtgccaccatgcccagctaattttgttgtatttttctgtagacatggggtttcaccatgttgtcgaggctggtctcgaactcctgagctcaggcaatctgcctgcctcagcctcccaaagtgctggattataggcatgagacatggcgcccagccttcatcaagtattaattgccagagttaaaagggtcagggaagacagaatgcactgtttccttacagaattgattcttcaaaagggagtttctcaggccgggggcagtggctcaggcttgtagtcccaacactttgggaggccaaggcgggaggactacttgagcccaggagtttgagaccagcctgggcaacttagtgagacctctctactaaaaataaaaaactgcacctgtagtcccagctactcaaaaggctgaggcaggaggagcccttgagctcaggagttcgaggctgtataagccaaggttgcgccactgcactccagcctgggcaatggagtgagaccctgtctcaaaaaataagggagtctctctgaatctactgtaattctgagggctgcacgattaaaaaaaatttaaaaattaattaaaaaaaattaaaaaccgccagacacagttgctcactcctgtaatcccagcactttgggaagctgaggagggcaaatcacttgaggtcacaagttcgagaccagcctggccaacatggtgaaaccccatctctactaaaaatacaaaaaaattagcctggcatggtggcgggtgcctgtaatcctagctactcgggaggctgaggcaggagaatcgcttgaacctgggaggcagatgttgcagtgagccaagatcgtgccactgcactccagcctgggcaacagagtgagactctgtctcaagaaaaataaataaattaattaattaattaaaataaaataaaaaaaccaaatctgccaacaccctgatcttggacttgtagtctccagaagagtaagaaataaatttccattttttaagccatacagtctgtggtattttgttatagcagccccagcaaactaacacagggggctccaagccaatagaagcacctcctcctcctcccaggacagttagagaccacctttaggaactcgctgtcagaaacctgggggcagatgaagccagattcctggggcttaagagaatgggctatgaggaaacagcagtggaacacaagtgtgtggtgcatccaaagcctcaaaggctgtttctcaggattcccacaacctagttccacttttcctcattagccttctcagtactgccaatgatcccaacagaatgctttggctggtcagactcatctttttaccaagtccagccagcttttgtctctataactgtgctttgatcatccaacatttcccacccattcttcaaggtactgctcaattccctaaccattttgttccatgctgatctcccttttctcaaccagcttctgcacttaccatataacttggtctaactattcagtctaattgtctgtatcacagaaggtaatatacaaaagcatgagactcattatttgggtcccagtccaacaatattgggtactttgagaatagagactatgtgttcttccgtagctctgaagaaaagtgaatttgccagggaaaaacaatgattgtggacataaaacaacaaaaacaaagacgaactttccagattcatctttttctacggtctgcccatttgccactgaagccactagagaggtattttttgccacatgcagctgtgcatttgaagcatttaggaaagatttgcctgtcatcgtgttgtaattattacttataacagttttcatggtttgtttttgtcattgttaacttcattatgaagaatgtaatgcccacatgattcattaaagtataattatagttagcacaagttattaactcattaggcaagagacagttcagaaagtaaacttaataggatgggacacaatccttagaattgtaacatttaaataatccttgaattgcagagagaatagagacctatttcacagtcaataaaaagggggaaaaaaaactctttgaaatttggattatttcaaattgtcatttgaaacagttgaacattattcaataaatcataatatcctgatttaaagatgcagttactgttccaaattaaattccctgatgttctgaagaaatcttacggaatctgacatgcttgagggtaaggaatattcaacgacaaagggcagcaagagaaaatagcctggttcacaactctggaattaattcactgtagctgaagcttaaagggggtgggggaaggaaggctggcacagtggcttacgcctgtaatcccagtgctttggggggctgaggtgagaggacagcttgagcccagggattcgagaccagcctgggcaacatggcgaaaccctgtctctacaacaaatacaaaaattagccaggcgtggttgcctggcctgaagtcccaactactcgggaggctgaggtgggaggattgcctgtgcccaggaagtcaaggttacagcaagctatgatcgtaccactgcactccagcctgggcatgggaaacccagtctctttatttaaaaaagaaaaaaaaaagtctgaataaatcagtccaagatatgaatccaaactggaatgatcagataccatcatcttactgtggcaactcaaccacatttcagcaattcacactacaattgctcctggatactcatctcattatcatttttttaacttccaaaagcatatttaagattattttgtgtttcccaatttacagcccaaaaggactcaagacacttatttgagagaatcccaaaatgtctgggtgagacacaaaatgatacgccaccagaagtctcaggggacactgggcacatgagaactaaggctggacaacagcaggttatgaagaaaacacaacgattcccctttgtcagcttcctgcacctgaccctgaaggccgccatgggtaaggccgggtctccggcacatctgcaccatgggcacgcaacagagtcgcacagtgcctagctaagcgcggatgtgctaaatcaaggctgaaagaaagcctggccctgcccttaggcatcagggattttccaagtttgattctcctgtcatcagaagcatcccgggaaggatgctcgttacactgcagattccagccaggcgcggaggctcacgcctgtaatcccagcactttgggaagccgggaggatcacttaacgtcaggagttcaagaccagcctggccaacacggtgaaaccccgtctctactaaaaatacaaacaaacaaacaaaaaattagccgggcatggtggcgcccgcctgtaagcccagctactcgggaggctgaggtgggaggatcgattgaacccgggaggtggaggctgcagtgagctgagatcgcgccactgcactccagcctgggtgacagaatgagactcagtctcaaaaataaaaataataggggcaggatgcggtggtgcacgcctgcaatcccagcactttgagaggccgatgcaagcggatcaactgaggtcaggagttcgagaccaccttgaccaatatggtgaaaccccatctctactaaaaatacaaaaattagccgggcgtggtggcggacgcctgtagtcccagctactcgggaggctgaggcaggaaaattgcttgaacccgggaggtggaggttgcagtgaaccgagatcgcgccactgtactccagcctgggtgacaaagcaggactccgtctcaaaaaaaaaaaaataataataaaaaataataataaaatgcagattcctgagccccaaagttgactacaccaatcaggatctccggggttcgcgaacgtgcatttttacagccccacccccctccaaccctcgtccccttccccatcccccatcccctccactaccaggtctagcggcttcaggcccgggcgtgcgcaggcgcgtcccccgcccgccgcccacccggccgtcccgctccctgcgccgcgcacctgaggcagtcgttgtctctcacaaggcgcgcgctctcggcggggggcaagagccccccctccaggtagaggcctaggaaggccccagaactgaagccgaagcgctggcggatgagactaatgagatctgtgacgactcggcatctgttcaagtcgaccagaagccagaaggccgtacagtgcggggtagctggcggcgggtaatcaaattgaagccgtagcctaaccgtctcggaagctgccatcttgcttggtgctcaacggaagccgagagataccacggggccaccgagaggcgtgctcgggcggctcgcccccgccggagcctttggcgtgtgccacctagtggtgaaacctggctactacaggctgcgtctaggcgagaactcggagcgtggttgatttcattcaattttgttcacggcagggctgaggaagggaataagtgaaatgcctttattacatttctactgggcgctatgtagggtctcctaattaaggcaactctctggataaataacatttctcctcagcagtagtcttctaagatatttgctcatcgacgtgaaagatttttataaaacaatcctaacacatttcgctgacaaaatttttcatcatgatgagttgaaaaagatgtaagtcctagtgtgttctcaatgttgaaattttgaaataacactgttaatcattcttccaaatgtatccagtggaatataaataccttagccttttaatacccaccaccaaacaaaaatgtccttgcatttctcaccagataaataaatcagtatttacattatttcttctattttttgaactagaatttacatttctccacataatatatattaactcctttaattttcataacaaaagttaggaattatgaactgttatccttatttagaggatttaaaaaaaacaaggttcagagagtttaagaagtaactagaggccaggagcagtggctgacgcctgtaatcccagcactttgagaggccaaggtgggcggatcacttgagaccaggagtctgagaccaccctggccaaaatggtgaaaccccaactctactaaaaatataaagattagccgggtgtggtggcatgtgcctataattccagctactcgggagactgaagcagtagaatcgcttgaacccaagaggtggaggttgcagtgagtcaggatcgtgccactgcactccagcctgggcaatagagcaagattctgtcttaaaaaaaaaaaaaggagtaacttccccaagttcactagactagttaagttgtagataccagggagtcagtagatgaattgaaaacaaaattttttaactgaaagtaagggtttttggattttctttttttagagtcttgctctgtcacctaggctggagtgccgtggtgcactctgcctcccgggttcaagtgacttcccacctcagccttcctagtagctggaaccacaggtgtgagccaccaagcccagctaatttttgtattttttgtagagatagggtttttccatggtggccaggctggtctcgaattcctgaattccagcaatctgcctgccttggcctcccaaagtggtgggattacaggcatgagccaccacctccgactaaaatcaagtttattagagaattaaaggaataaaagaatgactactccatagacagagcagcgagcccatactataagtatactcagtcaagtatacttatagttacttcttgactgtatgctaaacaaaggatggattattcatgagttttctgtatccctaggaaaggggcagggatttccctcagaactgagggttactccccttttacaccatacaggataacttttgggcatttccggctgggcgcagtggctcacccctgtaatcccagtttctccacatcctgactaccatttggcattgtcactattttttagtcattctggtagatgtgttgtggtatgttgtggttttatttatttgtttgtttgttttgaggctgggtctcattatgtctccagtgctgaagtgcagtggcgtgatcacaaggcttactgcagccttcacctctgaagctcaaatgaacctcccacttcagcctcctgagtggctgggactacaggcatgcactgccatgccctgctaaattttgtaatctttgtagagacggagttttgccacattgcccagactggtctcaaactcttgggctcaagctatcctcccacctcagcctcccaaatattgggattacaggcatgagccaccatgcccagcctcttgtggttttaatttgtattttctaatggctaataatgttgaacatttttcctgtgtttatgtgcttcttcagtgaaattctcttcaagtcttttacatctactcttattagattgttaaattttgagagttctttatgtattctagatagtagtactgaggcaggaaaataggatctggaggcagggaacataaggccaattcacacttcagctgtgacaggaaatatcctcttcatttacatagggcatacgaggagtaaatgactttctaactttacctcatcctctccatttacataggacatacaccaagaaaccagtggaaacctctggagggtatttaagcccccaaaaattctgtaacagggcccttgagcccctatgctcgggcctgctcccaccctgtggagcgtactttcattttcagtaaatctctgtttttgttgcttcattctttccttgctttgtttgtgcgttttgtccaattctctgttcaagatgccaagaacaccctccaccagtaacagtactttgtcagatatgtggattgcggattattttctttgactctggagcttttttttttttttaatcattctcttaatagggcctatcacagaccaaaagttctaaattgtgatgaagtctggtcgatcaattttttcttcactgctacctctgcctcccaggttcaagtgattctcctgcctcagctgcccgagtagctggggactacaggcacccgccaccacgcctggctaatttttgtatttttagtagagatagggttttaccatgttagtcaggctggtcttgaactcctgacctccggtgatctgcccacctcggcctcccaaagagctgggattacaggcgggagcctctgtgcccagcctgtttgttttttgttctgttgtccaggctggagtgcagtggcaagatcatagctcactgcagcccctactttctgggctcaagcaatcctcccagctcagcctcccaaagcagtggaattactcgtgtgagccatagcctgagttaatttttgtgtaagagttatatcagcgttcatttttgtttgtttgcttgcctcttgatgtccaattgctccagtactatttgttaataacactatatgtcctccattttgaatcttttgaatgtttgtcagaaatcagttgggcatatttgtgtacatctatttctggattctctgttctgtttcattgatctatatgtctttccctccaccaacaccatacagtcttttttcttttcttcttttctttttttattgagagggagtctcactctgttgcccagtctggagtgcagtggcgtgatcttggctaactgcaacctctgcctcccaggttcaagcagttctcctgcctcagcctcccgagtagctgggactataggtgcgcaccaccacgctagactagtttttgcatttttagtagatacagggtttcataggtgtacaccaccatgccaggttaatttttgcatttttagtagatatagggtttcaccatgttggccaggctggtctggaactcttgaccccaagtgatccacccggcctcccaaagtgctgggattatgggcttaagccaccgcgcctggcccttgttttcttttagagacagattgcgcccacagtgcagagcagtggtgtgatcatagctcactgtagcctcagactcctgggctcaagtgaccctcccagttcagcttttcaagtagctaggactaccatgtccattaatttttaatttttttgtagagatagtgttggactatgtcttccagactgatctcaatctcctggcaggtgccaccacgcctggctaattttttgtatctttagtagagacggggtttcaccatgttggccaggctggtcttgaactcctgacctcaagtgatccgcctgccttggcctcccaaactgctgagattacaggcgtgagccactgtatttatgctttgccctaattgctttagctattctacttccttttccttttcttataaattttaaaataatgttgtttgtgtatatctccaaaaaatcttgctgcgatattggtagaaattgtgctacacctatatattaatttggtatgaattgacatctttaggatgttgagtctaaatccatgaacacattatgtctttccatttattcagctttctgatttcgttcatcagcgttgtgtggttttaagcatacaaatcccatacaggtgttgttagatgtccggactccaagtgccagttccttcctggtgttcagccactgcgttgatcctccacaggggcctgccatgcactgctctgatgaggcattccaccagggcaattgcctaccagggactgctctcaggatccatgtcactcaagctggctggagtcccccgcagggatgctccacagggcaggcctaagctacctaagggactgcctcaactgtccgttaatcacctcgcttcccggtcagggaaccaagaaatgtagcagaacaagccacacacaaaacccctcagacaccgagttaaagaaggaagggctttatttggccaggagcttcggcaagactcacatctccaaaaaccgagtaccctgagtgagcaattcttgtcccttttaagggcttacaacactaagggggtccacatgagagggtcgtgattgagcaagcaggaggtacatgactgggggctgcatgcactggtaatcataatggaacagaacaggacagggatttttcacagtgcttttccatacaatgtctggaatctatagataacataaccggttaggtcgggggtcaatctttaaccagacccggggcacggctctgggctgtctgcctgtggatttcatttctgccttttagtttttactttttctttctttggaggcagaaattgggcataagacagtatgaggggtggtctcctcccttaaaggaactccccaaacctccatgatttagcaggagacaaagagaagggtaatcacccagcacctagacccatttagattaagtaaatttactgaggctccagaggaaggtcttcaggactcagaccttaattatagattaaaagtagttaatcacttatgtctttagatgaatgcacacttaacatgtagacatatagcttagaaggtatataagctctggaaaactttgtaatttggagttggtctggtgataacttccaggccttgtccctgtaatcggttgcagaaataaaatctttctttctccccagttcatctggatctcgttattgggccatgagaaatagcagcccgaccctcactctggtctgggaacaaaatttggcaagccagccaggagagactgggatggtgctgtgttcagcggctagcagcttgcaatgagacagtcttcaggaggatcccagcagctgctgatgagatttcccaaggaccctcttgaaggctgtttcatgcagaaaattgcacatctctttcactactggggaagaatggagatcaggagtggatgcactcaaagggtgagttaattgcgagcctattgttttcctgtctcaacttgttaagccatttgtccagtaccgccaagggaagcaacagggctcatgcatacacctgctttaaattttggttgaccagcttttgagttggttttgagtctgttttgcctgagtgcactcccccttttgttgcccaaaatttgtgtccacttatctgtgtatctgtcttataccctttgatatcatataaacatgaaaatgggaggtattgggtccattgctgctgagaagcctctgggaaggaaaaaatttttttatgagctcaatggctaaaagtcagcttaattaaaagctagcattcaaggtgtgtatatgtacatgcgcatattgtatttaaaaggtcttaatgggctgggcatggcagctcatgcctgtaatcccagcattttgggaggccgaggcaggcaaatcacgaggtcagtagtttgagaccagcctggccaacatggtgaaaccccatctctactaaaaatacaaaaaaattagctgggtgtggtggcaggtgcctgtaatcccagctactcaggaggctgaggcaggagaatcgcttgaacccaggaggcagaggttgcagtgagccgagattgtgccactgccctccagcccaggcaacagtgtgagactttgtctcaaaaaataaataaataaaaataaaaggccttcatgtttgtttatttctctcctaggaccttgtctttttgagcaaagatttttcttctcggttgactgaattctgttttcttcattaatagctattgcaacagaagctactccagggtttttttcttattttctttttctgatggagagtctctctctgttgcccaggctggagtgcagtggtgcgatctcggctcactgcaagctcctcctcctgggttcacaccattcttctgcttcagcctcccaagcagctgggactacaggcgcccgccatattttttgtactttttagtagagacagggtttcatcatgttggccaggatggtcttgatctcctgaccttgtgatccacccgccttggccttccgaagtgctgggattataagagtgagccaccgcacctggcctactctagggtttttaagaaaaagtataatttagacactttgtttgaaaaaatattttttaagtgcacagtaaaagctggtcacatggtctagcctcataataagtctcccttttgaaaacccaagattaggtatgggctctgcccagaactcaaagatccagttaaaagaggaaaaacgacatcttatgaatctgtaaaatgtgcttctgttggcatgcctaatgcatctatatatttgtgtcttgtgtacaccatgtttcactactgaaaatatataaaggagttctaattaattggctcaaagaaaaataaaagcacttaaatgctttaacagaacaaaggaaagactagtcaaatgctttttcaagtttatgtgacttaagtaacatctttaataaataagctagctttaaaaattattggtaaagtaatattagaaatgtcttaggagctgccagtgtacatttttgtttgcatttattgatcaagcaatttcatacttatctctgctaaatactagaaggtgtcaaaatttggcatagaggctacaaaagtatgactcagcccaatacagaatgatctttgcttgtgtaatttttaataaatgaaacattaatattggtttaatgaagaagctacatcttgaattatttagttaaatacccaaacttctaatcttgtgttaggcagtctagtccatagacatgaaggaagtttgttctgcaaaaggactgttatcatctttgtttcaaagctaaactctaagttaatgaacaagaatagcttggaggttagaagcaagatggagtcagttaggtcagatcgttttcactgtctcagttataatttttttattatactttaagttttagggtacatgtgcacaacgtgcaggttagttacatatgtatacatgtgccatgttggtgctcagttataattttgcaatggcagtttcataactttaaatgaagactatcacagttttcatgaataatctaggtaaatgattaaaataaataattagataaatgtaatgggataaatactcataaacaaacttgtcataatttagaatctaaagttatattaaacaacagagattttattatttggttattttccagtaaaaatatattgtaggagctactcggaaggcttaggcaggagaatgatgtgaacccgggaggcagagcttgtagtgagtggagatcacgccactgcactccagtctgggcaacagagtgagactctgtctcaaaaaaaaaaaaaaaaaaaaaaaaaaaaaaaaaatatatatatatatatatatatatatatatatatatatatggtaggaaaacattctaaaaattgtgtcctttgtaaagggtaactaatttttgtctaattcaaaacttatttaaaggttatatataaaacaaggtattaaagaaaagagaatttatgtaagaaaagatctcatatggtaaattgttgccataaagtaaaataactggttgtttaaagaaagggctatttaggacaagtcagaaagttgaggcatgtcagagattgcctgtgtaagtcaagaaagaatttatgaaagggaatttacacaagaaatgttgtacaatttaaaggtgattagacctcctaaatactttatttaaaaaattgcctctatgactcttagctgtaaaacttgcctgctttacagctaggtacggcctaggacacatggagttagatgctggaataagtcagacttacctgcacttctgtctaggttctaggctccacacttagtagataattaaaatcccaaacttagcaaggttttcacaaaagtaaagtttgccaagagttaagagtgtaacatgtatttaagactgttaaagaaacagttcacatgcaagcagtgtaaggaaagtaaaatatacttttggtaaaaagattataacgaggcatgagaatgtggatttttgcctaaatttaaaggttaaaggattgttttaagttgaacaaaataaagacgaaggtttaagcaagttgtggaaggttgattgtaaaggaaattctttgtgtaaacatattggctgaagttaaaggtgtatcatccagtgtttttctcaattaagcattaaaataaaagcacactgggtttctcttagagcactaacctgctctttaacaaaaattgtaaaggctttttttttttttttttttgagacgtagtctcactctgttgcccaggctggagatcagtggtgcgatcttggctcactgcaagctccacctcctgagttcacgccattctcctgcctcagcctcccaagtagctgggactacaggtgcctgccaccatgcctggctaatcttttgtatttttagtaaagggttataaaaggtctataaaaatattaccttatggtcaaacattaaaattgggtaaatatgtctataaggttttactaagaattgggtttaacattaatagtacactaatgtaaaggtgtaattggcttatttggtataagaattatgcaggaagaattgtcaaatatgaaatggtgtttggctttctttgggctatatttgtatgaatatgttattggtatgtgttccaaagttatgggagactcctatatttctaatatatcttagtgtacattatcaataataattataatagttatgttaagttattgtgtaccacagaggtaacagatttccttgtcaattgtatctttaactatggctaccctaaaactttttgtcatccataaacaattgttctcctcttttggtcctctttagaaggtggttttataatcagctataaagctctaacaggtgctcttgaatgcaggtttctgataactttggagattgtgacatcagaactgaggaaaaatgttcaggactttttttttttttctcttgagacaagagtcttgctctgtcgcccaggctggagtacagtggtgtgatctcagctcactgcaacctccacctccaggttcaagaaattctcctgcatcagcctcccgagcagctaggactacgggcatgtgccaccatgcctggtgatttttttgtatttttagttgagatgggatttcaccatggtagccaggctggtctcaaactcctgacctcaggcaatccgcccacctcagcctcccaaagtgctgggattacaggtgtgagccaccgtgccaggcctcaggactcttgaagagctaaactgctcattaatatcaagcaggacaggaattaactgcattaactgaactaataggagactgaagtgatcttttgactttttgcttaaaatattgctaattctttgttttgtttttcagagtcaaggaaacttttcttttgaactattgacagcttttaacaatttagtatactcccatgaacaaaatttgagcatatttgtttctctctagctgattttctccagaatttgaaaactatttgtaagtattcttaatctatggcaatatagttatttggataagtggaataaaaatctgatttcttttgtaacaggtcacaattgaaaaaactgatcattttaccaaggctttgactggaatggtgtgctttcctttaagaaatcaaacttgacttatggagccaacggaaccccaagttgtcttggaacctcaagaggagagaaattcacccaacacataggtatttgatggtacaaatccatgactgggcttggctttaaagtcttatctgagattcctgctgtggaacaaagttccatcaaagccagtttaaaaggtctatgtgaaaaataatttttcttgctgcagtttatgcaaataatctggccagctgggcatagtggctcatgccagtaatctcagcacttcgggaggccgaggtgggcagatcacgaggtcaggagatcaagaccatcctgcccaacatggtgaaaccccttctatactaaaaatacaaaaattagctgggtgtggtagtacgtgcctgtaatcccagctactcgggaggctgaggcacaagaattgcttgaacctgggaggtggaggttgcagtgagccaagattgtgccaccgcactacagcatagtgacagactgagactctgtctcaaacaaaacaaacaaacaaataatctggccaagtataataaagcaaattggtcctatcatgatttgtctctagtaaaaatgggaaactggagacagaaaagttatgtttcaaaaactatagtacacctattgttaaattctagtcttgcctgatgtttttcagtttttattactttctacagtttggatgaagttctaatttttctggctacaggtctccaaaataatgttttcaattttttcctctttagtttcctttttccccattctttcaattggaaatcactgaaacttaagctgtgcttacttaaagccctgtgaactaaacaacttaaatttcagaagaaaacagcagcaacctatttatatgttgctgttgcatactattacgctgttgcaaactatttacatgtgttgctgttgcatactagtatgtttcaacaggtgctgcctctaagccctgaagcagagagtgctaccaagaacaaatcgacctcttccactccagtgctgtgtttggtgccccataacgacgaccctctctcagcaggaagtagccagaaaggttatgatgtcccatctccctacaatcctcgtgataaataaatatacaagcatgatagatatcatgtgcaaattgacagtggagattgtggcaggcggatctcactaaagcaggcttctgtaacaactgtttcagtattgactgagtggttaagttaaatattaaaagccagtggcccttatacaaaggctgggatggaacaaaagcccaccaagagttttgcgtaggcctttcctgggccttaaagcatgacaaaataatgaaggaattcttaacaggacccatttaggattaaacaagttttatcatgagtctgaagaagctttccaggcctccacatacaagtttattgcaggtctgaaggaactccctaaacctccatgatttagcaggagacaagataagggtaaccaccccagcacctggacccatttagattaagtaaatttactgatgctccggaggaagatcctcaggactcagaccttaattatagattaaaagtagtgaatcacttatgtctttagatgaatgcacacttacacgtagacatatagcttaaaaggtatataagctctggaaaatgttgtaatttggagttggtctggcaataacttccaggccttccccctgtaactggttacagaaataaaaactctctccccaattcatctgcatctcattattggggcacaagaaatagcagcccaaccctcagttttgtccaggaacactagaattaccagcgtgagccacagtagcttgcctgtaaatgctctttatcaagttgaggaaggtcccctcaattcccattttctgaattttttaaataataaatttaaaaactgtgtgttaaacttgtgatgttaaattttgtcaggtattttttctgcactgatttatatgattatatgatttttcttctttttccttttaatgtggttgatcattttgattgtttttcaaataatgaaccatctatgtttccttacaataaattctatttggttatggtgaattaattctttttatgaaatgctgaattctatttgctaatattttattaagaatgtctgcacctacatcaagtagagttttatggatggaaattaaaagaaaagaagtttggggctgaacatggtggcccctgctgtaactgcccaacgggttcaccttgcccactgcctagacagaaccggtttatcaagacaggggaattgcaaaacaaaaagagtaactcatgcagagctggctgcgcaggagtcaggagttttattattactcaaatcagtctccctgtgcattcaaggaccagagtttttaaggataatttggttggtggagtgccagtgagtcgggagcactgattggtcaggttgaagatgaactcatagggaatctaagctgtcctcttgtgctgagtcaattcctgggtcggggccaccagaacagatgagccagtttatcgatctgggtgatgccagctgatccatccagcgcagggtctgctgaatatctcaagcactgatcttaggtttaactatagtgatgttatccccaggagcaatttgggaaggctcagaatcttgcagcctccagccgcattactcctaaaccataatttctaatcttgtggctaatttgttagtcctgcaaaggcagtctagtctccaggcaagaagggggtttgttttgggaaagggctgttagttagcattattaactagttccctcaaccataaacatcttgtaaccaagagtgcccaaccccctgggaatataacccagcagatttggctttttctggcctttattcaagatggagtcactctggttaggttgcctgacacaagtgcacagagactgatatgctcaaagggaagatgatgtgaagacacatgagaagacagtcacgtaatgccaaggtttaccacaagcatctgcaccaagaattcgatggatgggcctttaggaactcccaaccaatttccattagcctccctcccaaacccttctcagaataaacatataattttaaaaacagttttgaggttcagtacccagtatcttttttccagtcctattgcctcctttatagccgtattttatatatatataattttttttttttttttgagacagagtctcactctgtcacccaggctggagtgcagtggcacgatctcggctcactgcaacctctgcctcctgggtttaagcaattctcctgcctcagcctcccgagtagctgggaatacaggcacaagccgccacacccggctaatttagtttcaccatgttgcccaggctggtctggaactcctgagctgaggcaatccaccctccttggcctcccaaagtgctgggattataggcgcgagccaccgcgcctggcccagtcctattatagtttttagctgccccaagaggacaggtttacattgtagaaatgcaatccacttcaaattgaaccacaagcataacttttaaaaaatgttctgtagctgacagcctttgcataaactgtgtcagtgagaacattttgtcagtgggagagatctgatttcaccaaccggcatcttgcctttgcctttagccttcaagctacctttaattattcctggacttctgggccaagctaactttgggaggcatttaggttataggttaaatgataatggcccttccccaaactttacgctaaatgaccaccaggctaagaaaatagaggaggctgaattctgctaaggattgccagccattattcctgaggtcacaaaatatgcaacttctccaattactcctgcagacaccatcactattgtagaacctaagattagccttttgagatatcttttcaggtttttttgcatgtctgacacctggctccacctggacctaccaactgctcctgcggccccacctggaagcaaatccgcgcaagaagacagcttcaactccctgtgatttcatctccaacccaaccaatcagcagcaagcatccattgcctagccacctctgctcctacccctaaactgtctttgaaactactcctcagagactgatttgagtaattataaaactccagtcttcctttcagccagctctgcatgaattaaactgtttccccattgcaattcccctgccttcataaattggctggctctatctgggcagcaggcaaaaagaacccattgggggattacatagccactcctcatcggagaaatttctactggctcttcttccagcctcaactctctttggctaatctttctctatatgtagccttcacttcttttcatctttctctcttctttcctctcctaggagcaaaacaaaatttctcctgggccgcacagtttggcaattatcttttgttgccttggctgcagctactatgccatcagctcccaactcctaacttcaatgaaccaaggaggtatttttcttaaacaaagaccactccaaccctgaagattggaatttcgccactgcctgtaaggataacaagctttaatctggtttctacatgtggtttttgtttattttgttcctgtgattataaactgtaatgaaaaaagaaaatgttactgtaatacttgatatcatgtatttatccatgtatccaaccttctttccatcctatccatcaatccatcttatattctggatactttttttttttttaagagacatggtctcactatattgtccaggctggtctcaaacttctaggctcaatcaatcatcccaccttggtctcccaaagagctggattacaggcataggtcactgtgccagcatctggatacatttcaaagaaaattgtatacattggtacaccttcccctaaacactttaatatgaatatcattaactagaggtgacattttatttatattttttccttttgaagtcatattagcgtattataaaatgcacaatttttttgtgcgtgtgtgagatggggtcttactctgtcacccaggctggagtgcagtggcaccatcttggctcactgcaacctccacctcctgggttcaagcgattctcatgccttagcctcccgagtagttaagaccacaagcaagtgccaccacacccagctaatttttgtatttttgtagaaatggggtttcactatgttggccaggctggtctcaaacccccgacctcaagtaatctgcccacctcggcctcccaaagtgctgggattacaggtgtgagccaccttgcgccctgggctgtagtgttatttttgtggcaaaaaaattgaaaccctaaaattctgactgcagtggaagggtaagtgtatttcaagccctagtgatacagaccaacttggaagcttcagacaggaaaagtttgctagatagttatttatttttaactaagcatgtacttttatgtatctcccatatggcatggaacacctgctcactgcagcctggagctcctgggctcaagtgatcctcccacctcagccttctgagtagcttggacagcaggcgcgtgtcaccacatcagttaatttttgttattttttgtagagagggggtctcaatatgttgcccaggcattatggattttatgcattcgggaccatcccatgcttaaagcatgacagaacccggcggcatatttttctctgccgcagctttcagtgcaggggcacctcacaggcagggcggggtcaaggctctgtccagacaatggctgcagagtaaaaagcacttccatttatgggggtcaagggcgaggggagggagaaaggagcagggaaagaggagaagtggccacatgtactttgatttgttttttgctttttgttacatgtacttttgaagcagtatttagaagtagcctctcctacagcccctgctgtagcttgtctcctagctgtgaggtgagttattcagtaccctctaacgtaaaaatgaccttcagacagacagacagacacacacacacacacacacacacacacagaggaaaacagctctgtcatccactttttcttcctttcccgtccccagaccctcgattctctctttaaaatgactgctgtgaagataacgtaacacagagtaatactaatgacaaattatcaaaaaagaaaaaaaaaataaaaatctttattagtgttttttaaaatgacgtaaaagactatgggaaaaaatgccaacaatagttatgtataacttttttgttcatatttccaaaacgtttataacatacataactttaaaagaaaaataatttaaaaaatacatatctgaaaatgaaaccccgctgtttgccaacgaccagctggcttaatctgacttcgcagatgtagcagtgttggaaaacgtcggttcttttgctgagggaaggaagagatgggaggggtagaaagggcggtggttattccctttagtatttcgatccggtcacacaacctaaatccaacatctgcatcaaatgtctcctttccgaaatactctccctaaaatgacagagaacctggccaggcggacagaacggcccctgcgcatttgcaggggtcctggtgggcttgccgggcagagggcgtgcgggtctcagcaagctgccgggtccgcccaggccccgccccatgcccattcaggccccgcccccgacccgcaggccccgcccccgacccgccccgtccgcctccgtcacgtgatggggcgccgggtccagcctgttgctgatgctgccgtgcggtacttgtcatggagctggcactgcggcgctctcccgtcccgcggtggttgctgctgctgccgctgctgctgggcctgaacgcaggtaggttcaagcaagaggcgcaccagctgccatgcctcttttttctccaggcgtgagagtttgttactgggtttgtgcttttgaaaacatgtctcttttccccggttcttaccttgtgtaattatattgcttttgaatctcactcttttttttttttttccttaaaaaattcaaagtgctttttttgtccttttctggctctgggtggtctgagtgcttccgttctctcctacgcctagatagaagctgtgtgcagaaatgtatgatttggggaaactgctggtcaatgaggtttccccgattcaaaggccatgattggctgctaaatgaggatataaggtcgttttattttaagctgaaatctgcggtcaaaagtacccttacatcctaccacgaatgggacatttcattgagataaggccctttcttttcttgatcaaaacaaacaagataacatcttcccccacagcgatcttttttggcaaaaaacagatttgtgtttaataggatgacttgcaaattgattttcagcaaaacctctcctagtctgaagcaagcactgagaattggaactggccacaagcttgccttgtgaccttaggcaagttgttgaacagttttgttttccttttctaaaatggggatcatctggcccttaggcgagtgtctgggagattttgtaaaataagtagctctgccaattttaccagtagtcactgccaggcaagggagaagtgcctggggttaggtcaaaaggtacctgcgccttatctgtcattctcaagggagcgcagccttatctgttattgtcaaggacaatataatcgtgtgttacttgtatatagaaccttatagctaagtctgtaatgttttagtcatctgttttgctcctcaggacactttctggttttcttaatcttcattgttgttttgttttgagtcagggtctcactatgttgcccaggctggtctggaactgcctgactcaagtgatcttcctacttcagcatcccaagtagcccggactgcagacacaggccaccaccctggctctttcttatttacaagacgttgtctcattgtcttcctctctactcctgtctctttagctgttgggaccagtgttcttttactgaccaatggggcttgaaatttgagaagggaggaaatagaaggcagaaaactccagtcaccgaggggatcccccccatcatcttttaacaacagcccctctacttttttttttcccagagtggttttggaggaaaaaaaaaaagatgctataacttggaaattgttacgttagcaaaaagtgacaaagaaaatgtatttagcctactcttttctaaaacatattttgtggatgctagaaaagttaagtaaggaaaattggagttaggggattataggatacgtatattaaacacacatacacagatatatatcgttcagtttaaaaaaatcatctacatgagttaggaaaattgccctttttcatatttgttgtagctctttccttgctgtttgcctttttatttttgatttacagaaattttgttgtatagaaatataacaagtttctgttctcacctccatcattgtttcttttgtacagtctctggggtttgcttagattctttcctcatccagacattagaaatatatttaactatatttttgtatttttttaatgtttaaagtttaaaatttaattgcttgatcctcatggaacttatttcgtttatagtgttgagaggacctaaatttctctttttttctccaaaaaaggtaattgttgctccattactgtatattgaatattctcagccccactaatttgtgatgcctcttcactcatgttttttgtttgtttggttggttggttttttgtttttttgagataggatctccctctgtcacctaggctggagtgcactggtgtgatcacagctcactgcagcctcaacctactgggctcaagcgattctcctacctctgtctcctgagtagctgggaccacaggcatatgccacaatgcccagctaatttttgcattttttgtagagatggggtgttgctatgttgcttagactggttttgaactcctatgcacaagctatcagcctgtcttggccttccaaagtgttgggattacaggagtgagccaccaagcctggtgtcttactcatgtattaaatacgatataaaaaccagtatattgcattctgagatttttacttttttactcaaaatataaatctctcttgtttttacagaattataaaagtatttcctgtaatcccagcactttggtaggcctaggcgggcagatcacctgaggtcaggagtgcgagaccagcctgaccaacatggagaaaccccatctctactaaaaatacaaaattagccaggcgtggtggtgcatgcctgtaatcctagctacttggaaggctgaggcaggagaatcgcttgaacccggaaggcagaggttgcggtgagccgagattgcgccattgcattccagcctgggcaacaagagcgagacttcgtatcaaaaaaaaaaaaaaaaaaaaaaaagtgtttcatatttattgttaaaaatccaaacattacagaaaagtgtagaggaaaaagtgaaagcccctggcctcctatgccgctgttaagtttggtttcttttttcatagccgaggttttttccttattcctgcaatgtactggggtggctaaattaccaaactataaaacaaatcatctctagcctagcatggctgtctctaccaggcttggaatttacctgtacattaggcactcttctggagagtgaaattgaacttctgtttcaggagctgtcattgactggcccacagaggagggcaaggaagtatgggattatgtgacggtccgcaaggatgcctacatgttctggtggctctattatgccaccaactcctgcaagaacttctcagaactgcccctggtcatgtggcttcaggtaaagtagcttcccagcctggcctgaggtcaaagccaagtctcctctgtgtggctctttgcttgctttttgggctgatgtctcagcagtgaagggcggatttggtccagcagtgtgacctgggggttcggcgtgcttctgaggtaggctgaggcaatggtatagccaaggaggctaaatcagagggcgagggggttctagccttttgccagagtctctttatatttccagacggtcacaagaaggctcactgaaaactcctgatgatacatttgaatacatagtgatagaaagtgttttgaggccgggcacagtggctcatgtctgtaatcccagaactttgggaggccgaggtgggtggatcatacgaggccaggagttcgagaccaggctggccgacatagtgaaacgctgtctctactaaaaatatttaatacaaaaattatccaggcatggtagcacatacctataatcccagctactcagatggttgaggcatgagaattgcttggacccgggaggcggaggtagcagtgagctgagatcgtgccactgcgctccagcctgggcgacagagcaagaccctatctcaaaagaaaaaagaaaagaaagtgttatggaaggttccaaagcaaagacctgaggtagcctgaccctcccttcctctccatacaatcctttcctgaaccctaacttcttacccccagaaaacctgatcttttgaagggactgctacaagccttctgcaccttcgtgtgactgttgcgccttccccctttccctgagtgtgtttgcattttaaccttgagctctgattgtaggatggaaggcagggagctggttgaaagatttgtagggacaggcagaggctcttttctggcatttctgaaatatctgtccagagatggcccacccccacccggaagaccacccaccagggaggaattaaggaacatggtcttgcctctggaaaatgtaggcatggcccagctggaaccctgggcccctcatcagtaaatagggaccctggtgctcacctccataggatgctactgggacgtcttccaacaatgctggtatttataagcagcctcccaccacctgggttttgcctcccaggatggtcgatgcagactttctggtgagatagagcgaaaatgagcagttttcagggaggggcctttctcttttggaattatcacttgtgccacctctgagggctagagctgaggctcagccccaggtgcggttatgataatgcagaaaaagaacccttgtatgtcagcctggggagccctgttcacctccggtggctggagacaaaggtgcggcacaattggcagggagagccaggccgtggacaagctcaggcctgccgtcaggggcctcgggttttcagtgcctacctgccacttagagccatggcaagatacttcctcctctgggccttggctgtctaatctgggagattttggtggttttcaaactttttgttcatcagcagaacttttcttttttttttttacccccaaatgaaagcttacaaaggggagacaaagcagacaaaagcacaagtgctgaggctgaggcttctcctttgaagtttatcaactgaagagaataaattgctcttcacttacccagagacccaagagagaagaagaaagattatgcttacagaagaaataactaatttagatgaaaaggagatctattttagcagcctactgaggacatggtgctgacttctctcgggggaatctttgagaatcgaagtcatgtcttctgagtgggttagcaaactatgttagggacactttcaagtcttcgaagcgtttcacttggtccactgacacactgactgtgtctcagagtttctggatagccctgggccatgctagcaccctatcccaaagttctagacaaaaaagaggttttacaataggatatattcacgtagaacagaggcttcctccatccagcatctcattgccttttgaggagaggggaatgaggagagaggagagggagaggtcatcttctgctgtctccctggcataccagaagcagaggagaactgagatttctcccacaaagacccaacccctaggatttccagcttttctccttttgctttgatcctacctcatcctaataagtccattaggaaaaaggaacccagctttcattggagggtagatccctggctttaatttattgcatattgcattataaatatttttcaatgttgccacatcatttttcgtagttcatgattctaagtggcagtgtagcattccatgcagtagatgtggtatggttgcctaacctgttcccctatttgggggacgtttgagttgcacccttacttctgttatttttaataggactgcggttaacatcttcatctggtttgtgaactttttactgcttaggaaatcttaagatacaaagggcatatgatcagggggatgtatagccttccaattttatcagagttaggttggtccaggttcaaaacattagtgttgtaaagtctttcccttttggggccctcttgccgttgctagttaccctttagccctgactctatcttgtcttttttttttttttctttagatttccctacacaaattgccctggcttttgttttgcccaaggtattccctttcatcttttttttctttttcttttttgagatgaggtctcgctctgtcacccaggctggagtgcagtggcgcagtctcggctcactgaaacctccactttttgggttcaagtgattctcgtgcctcagccccccgagtagctgggactacaggcgcacgcaccacacccggctaatttcctgttcttagtagacgcaaggtttcaccatgttggccagggaggacttgaactcctctcgaactcctgacttcaagtgatctgcctgccttggcctcccaaagtgctgggattacaggcgtgagccaccgcacccggtccccatttcgtcttttcatatctccctttcctacccatcctgctagtgcacagagaggccatatccttttattctaggtcctctgccctttccctcgcctcagctgacagggcccttctcatagactccccacctcaattggcccctggatttgtccagaaaaagcactgaccatcttttcccctgaccacctcccaaagagcctcctcttgtctcaattagaaagcccacccaacctgtcctatttgcctcttagtttcttttttctctgaagccctcagagcccatagaactgcccccaacaccgagctgtggttcagaatcctgcctttccctctcccatggatgctcacagtatcaaactctccctgccctgggactttagaaactgctgcattatatccacagaatctgcttgatcaaactgcttctaagtctgggtcccttatcaatccacagggactctgaagagtctcccatctcctggggagagggtgatggaggaagagtcagaaggcccagtgtctagtccggttagagctccttcaggtcagcaaggcctacggcaggccaaggctccagctcagaaaatcaggaggcagctgggtgtgatggctcacacctgtaatcccagcactttgggaggctgaggcgggaggattgcttgagcccaggagtttgagaccagcctgggcaacatggtgaaacctcacctctacaaaaaatacaaaaattagccgggctgggcatggtggtgtgcgcctatagttccaactacttgagggggctgaggcgggaggatcacttgaaccccagaggtagaagctgtggtgagccgagattgcaccactgcactccaacctgggtgacaaagttagactctgtctgaaaagaaaagaaaagaaaagaaaaaatcaggagtcaggaacattccattgtggacctcttagctcagctctgctcctttcagagaaaaacctcagcagttactaggggagctttgctaatgtggaagtccctggttcactagagaaattgtgtcttttgtgcaaattgacccagccatcactaactcataaaccatctatagcaaatgtggtcattcattgtaaagactaagatctgactaaaatttttgtttgtttcttctctcttccatagggcggtccaggcggttctagcactggatttggaaactttgaggaaattgggccccttgacagtgatctcaaaccacggaaaaccacctgggtacagtgaggacagtcctgagctaaaccttgccccgtggcctctcagaggccctgcccaactctgggaggggccacaaatgtagcaatccctcgctgtccttttccttttcctgtgactactgaggccatgggcacttgtccgcaggcttcctctctggcctagcttctctcccatttctcaggacagcttatcttgcaccagtctgcctcgccttctccaaaacaacccctctctccagctgccttcaaaaacctactacagcagacacctgggaccctgtgttatgcacgctggccatctccgcggcctcagacaccatggttgcaccctccagccacagcccccagtccttttctctctctcctatcctcctacttgtatcttgacttcccctttcaatgtctctcttgctgcccttctcacacctccccctcattcttatcgtctcttccttccctcacccctctgtggtcaactcccatatccttctccctttacagccttgccaaacccagccttgggtcactcccactgtccacctgcttagcccttacgcccaggctgcccatgggcagaactgcacacccaccctggggctgctgcacagcgtgggccccactcagggcttgtggctgttcctctctctgtgctcccactctcccggctgcacctattgctatgaatgttctccactttcctcagtgctcctcctccagcctccctctcgcattagaagctaagctttctgctctttttttttttttttggaaatggaatgtccctccgtcaccaaggctagagtgcagtggcacgatctcagctcactgcaacctctgcctcctggattcaagcgattctcctgcctcagcctcccgagtagctgggattataggcatgcgccagcacgcccggctaatttttgtatttttaggagagacggggttttaccatgctggtcaggctggtcttaaactcttgacctcgtgatccacctgcctcagcttcccaaagtgctgggattacaggtgtgagccactgtgcccggccactttctggtctttctttgtttttttttttctgtttttttgtttttgagacagagtctcgctctttcgcccaggccagagtgcagtggcgctatctcggctcgctgcaagctccgcctcccgggttcacaccattctcctgcctcagcctcctgagtagctgggactacaggcgcccgccactgcgcctggctaattttttgtatttttagtagaggtgggatttcaccatgttagccaggatggtctcgatctcctgacctcgtgatcctcccacctcagcctcccaaagtgctgggattacaggcgtgagccaccgtgcgcggcctctggtctttcttaagtgcttcctactcttgcctcagggtctttgtacatgctgtcctcttggcctgggcctttcctgtgcttggttccaacagaagtctcacttccaggagtggttgtagagtcatcccctacctccactccccacccccattgtccccaagcctcctagaactaaaagggccatatgagtgaggaccatggtcccagtcctgatgctgccactgcctgtccgatcttgtgaccttaggcacattctgggctctttctgggctttaatttcctcatcagcaagggacatggctggactgtgtcattattcaggatcttttatatgtaaattttataactttcaacctctttggaaaaggtattagaataaattctgctcttgcagtgtacagagaagccaggacaatgtggaaatttgatgcatttccaagaaaactgatgtgtgtccagactttgagtgtcctctggcttcttcgagttagtgcatagactgtctctgcatgcttctttctgcgctagtttattacatttagtacatttgtattgtatgaaaagcaacagcccagattatttgatccccgtgtgtgttaatctttccttcctgcctctccctttttttttttttgcggcggcgggggcggttggcctttctttgtttttgtttttttttctatgttcctgtcccttatttttaaaaatctcttttagcaacagggatatcatcaccacgctggtatcctcacatgtgtgggttttgctgagctagtagaaaatgatccaaagatgattggtgaccaaatgtctgattgcaacatttcgttttcctccgtggtacatagctccaggctgccagtctcctatttgtggataatcccgtgggcactgggttcagttatgtgaatggtagtggtgcctatgccaaggacctggctatggtggcttcagacatgatggttctcctgaagaccttcttcagttgccacaaagaattccaggtaagcaaagactcaggaacagctaagtaaagggctggcaatatcaactctacatccatcagcataaacctgaactgcctccagagtttaatgcctagctgatttcagagaaaactttttaattcccaagattgggttgtggacttttgtttctgtcatctctaaagttgatatttaacttgaaagaatgaccttggagtgagcattctaatcagacgcaataatcagatatggagtggtgggggaggaagacaaagcagatttgttttttctggtcattacgtgcaatagaaatttgaaattaatttgtgtgactcaaaaagcaatcaaggtagttaattctgtgtaattccttttcttgctagacagttccattctacattttctcagagtcctatggaggaaaaatggcagctggcattggtctagagctttataaggtaatggaaaataactttgttgttatggttttggacagaaaatcaattatgttacttttatgtactcacgtgctattaaatatactttgaatagggccatgtacatgcagagtacgattaaatctgtagtaataaccataaaaagtttttaaaagaagaatgaagattgccctgctagatctggaacaagatataaagcatgagtgagtaaaagaatgtggtactaacatagcaatagacaaataggttaattgcaacaggatacagaatccagaaacacacacacatatatatgtatgtgtatcatatatttgtattttatataaatatatatgatcatatataaatataagataacgtttcaaatcattggggcatggatataatgtcgataaatgttatggagacaaatacctatcactttggaaaatagaaaacttgtattcctgccttgtataaaatattaattctggatggattaaaatctaaacataaaaataaaaataatggagacaaatacctatcactttggaaaatagaaaacttgtattcttgccttgtataaaatattaattctggatggattaaaatctaaacataaaaataaaaattaggacagaatgcagtggcccacgcctataatcccagcactttgggaagcccaggcaggaggactgcttgtgaccaggagttccagaccagcctgggcaacatagcgacaccctgtttctacaaaaaaaaaaaaaataataagctgggcacagtggctcctggctgtaatcccagctacctgggaggatgaggtgggaggatcgcttgagctcaaggagttgaagctgcagtgagctgtgatcatggcactgcactccagcctgggtgacagaacaagactgtgtctcaggaaaaaaatgaaaacaaaaaccaaaaccaatgtcctagtagaaaaatgtggacaagcaatttgtagaagaaatataaacagcctttagacataagaaaaatcttcagcttttattagtaagccaagtccatgagatttgtaaatatttaaaagactgataacacccagttttggtaagaagtcagggaaataagtgctgtcgtgcacttttgatgggaatacaaattaatttaaatttaaaaggacaatttgacaatgtcaattttttaaagatatgtgtcatttcacccaataattttgtcctatgggaatacttatacatatgtatatgtcagagaatgtttattatgccattgtttataatgtttataaactgaaaacagctggttggctgtcagtagaggattgcttaaataaagtaggtatatctttccaagatgaaaccctttgcagccagcataaagaatggatccaggcgggcgcggtggctcatgcctgtaatcccagcactttgggaggccgaggccggcagatcgcttgaggttaggagttggagagcagcctagccaacatggtgaaaccccatctctactaaaaatacaaaaattagctgggcatggtagtgcacgcctgtaatcccagctactagggaggctgaggcaggagaactgcttgaacccagggagcagaggttgcagtgagctgagattgcgcctctagtctgggtgacagagcgagactctttctcaaaaaaaaaaagaatggatcttagcactttgggaggctgaggtaggaggattgcttgagatcaggagttagagaccagcctggacaacatagtgagacccctgtctctacaagaaagaaaaaagaaagaatacagagagctatatatactgagtgtggaaagttctcctttgggtatttagttgtggaacgatatgagataactttgtttgtaagtcaaaaacacttccatatgtggagatagatttgtatgctgtgacggcaaacaaaagggttagaaggatacatgacacacttaactgcagtcagttggtgagtgtgagggcacaaatgagacaaagtaaaagactttcacatttccttctatctcctatgtttgaatatcagtgagcttaaataagggttttttttaagatttattaatttaaaaaacttatagaaacagcatatgtacattatagaatattggaaactgtaacaagcataaattaaaaatgaaaacttcaccttcccacctgatggagatcactatagttagcatctgggtatatagctttctaaatatttttgtgcacatttatatagaattgtttagctgaatgagatcatattatacatactggtttcagcctgctttcttcaatcagtagttctcaactttctatttctgtaaattttcatctcaaatattcagactttttctttttgagacaggatcttgctgtgttgcccagactagaggctggagtacagtagcatgatcatggctcactccagcctctgcctcctgggctcaagtatcctcctgcctcagcctcccgagtaactgggactacagacgagcactaccgtgcctggctaatttttgtatttttttgtagagatggggttttgccatgctgcccaggctagcctcgacctcctggggtcaagtgatcctctgacctcagcatcctgggtatctgggactataaggcacataccaccatgtcccactgattttttaactttttgtagagatgggggtctcactacattgcctaggctggtcttgtattcctaggctcaagcgatcctcctgcctaagcttcccaaagtgttgggattactgcgtgagccactgcacctggcctgaggacgtttcttgtttcctctttcaggccattcagcgagggaccatcaagtgcaactttgcgggggttgccttgggtgattcctggatctcccctgttggtaagtgtggcattttcaggcattttttcactccccttttgcccatcctttcctgggactttgggctgtgttgtccagatcaaagagctaagcaggagaatgttctgggcccttagagaaagtgtttgctacatccaagaaatatagagacagagtgcctaccatggaccactaagggctgaactgagttttcttaatttaattatcacaacaaaaggatcaaattttacaattggaggcattctgaagactcagagaggtcaagaaatgtgctatctgccacgtaggatgagtggcctagtcaggattcaaatccaggtctgtgctgctcagtacaaaggcaaatctgttttgtcatcctgccccctctacttccctgatgctgacataagtgtttggggtaaaattcccgtctgttacgcatattgatggcaagacaaggttatcgtctggtcttgcaactcagaagtgtgcagttttgtaattgagcatccgtgttgcgagcataaataagagttgtttatgttgcagacacccagggtgtggccccagacatctgaaacaatcatcctggtggcgttcactctaacacagggtttctcagcactgttgacattgtgggtcatatagttctttttgtgggaggctgtcctgtgcattgtaggatattatcagcagcatccttggcctctactcaggagatgctagtagcaccgctccagtgtgacaaccagaaatgtctccctggggaacaaaaccatccctgattgagaaccattgttctaacctaacaaaacgtgatttccccaggcaaaaccaaactatcgagttagaaatcagaagagaggctgcctaggggcaaaggagggaaataagcaggaaaggtacatgagggaaatatatcttgattgcagggggtggttacacgggcatatgcattcatcaaaactcttctgaaggtacacttgtgatttgtgattatggctcagttttttaaaaataatcatttataaaaggtaatatttacccctaaaagatagggatttgcttgttacagagccatattcccaataaccattacgacttggaatagtatttcttgccctcatgtttgccatctgcagggtaggactgaagtagcataaaactgagtcagcatgaagaggagggctgctattcgtttatctgtctttccttcctggatggatctcgtaggacatcataaaactgcagaagcttagagaagcatgagagtttcttgtcagatactgctcttttgttcatgttgatggcaagacaaagtctccatcaggtcttgcaacccagaggtgtgctgtttcataactgagcatcctcactgggaacacagataagagttgtttatgactcaaaattatgatgctggccctctcacttcctcatggggtctcctcagtttcacagtagcactaagtactttacatgtgctaacttcatgtaatccttacaacaactccatgggatggatgctatcattatcctaattttgtaaatgatgaaactgagacttagagaggttaagcaactttcttagagtcacctagctaaatggtagaactgggattcaaatccaggcagcaggtactggaatccaagcaacctaaccaccttgctacattgtctctccaagatcagtacgtttcgcttcctggctttgcaagtgttattcattgtgtttggaatctacctttttctccttgccgtgacccactttaccttatgaatctgtttgtctggatcgtaatccatccttccagatccactttaagtattgcccctctatcccagaaacattggtttttgagggagaagtattgttaatttccatgaacaattgttaattgcttgctaggtagtagatactgttctaggtgctaggaaaagatacacagataagctcctgatcttcaagaaggtcttgatctgcactgtcactaagcccatgtgaccatgtcagtatggtaaccacttgccacatgtgactatataaatttaattataatttttaaatacaatttcattttttcaggggcactctctacacccaagtgctccatagacacatgtggctattagctagcattttggactgcacagatacagaacacttccattactgtagaaagttctattgaacaatgcaggcctacttcaaagattggtaaacaagggcccatgagtcaagtctgccctgccgcctgctctggtaaataagtttttgttgtttgtttgtttttgtttgtttgttttgagatggagttttgctcttgttgcccagactggagtgcagtggcacgatctcggctcactgcaacctccgcctcccaggtttaagcaattctcctgtctcagcctcctgaatagctgggattacaggtgcccaccactacgcctggctaatgtttttggtatttttagtagagatggggtttcaccatgttggccaggctggtctccaactcctgacctcaggtgatctgcccacctcggcctcccaaagtgctgggattacaggcgtgagccaccgcacccagccggtaaaagttaatttactgtctatggctgtttggaggctgtaagaacagagtggagtagttcaaccgagataggctggcctaccaggccaaaattatttactatctgtccctttacagaaagtttaccagtctctggcccagatcaaacaggaagtgggatgcattggagaactgcagccaatcctgtgttttaagaaactaagaaacaagtttgaaggttaagcccgggaggtgattaacagctaggccacggaagtcctggtgtgcttgcatttctcagagagtactctaaaagaataccagtccaggccaggtgtagtggctcacatctgtaatcctagcactttgggagaccaaagcgagcagattgcttgagcccaaaagttcgagaccagactgggcaacatggacttagttcctgcagaactaagactacttgaaacctactttgagacactttgccttaaggagccattgaatacttttaagctaaggagagacatactcaaatgtgctttataagttgaggtccttgattctttgttggcgtgtctttcaatagcacttgtcttacctagtgatacagtatttaatagttgtgagcttgtctaaaccaaggtcaactactattctctttgaggacaggcattatgttactcacatttatatcttaagcttttgctgcctctagacccttagtaaattctcaatatgtttgtgggatgggaataagccaattggcaatatagccatttgcactgttgcaaactcattagtcatcttccttatttagctccttggcagaagctaatatctccaaactggaggagcaaataagatgtagagcagaaatgtgagggtggggaaatattttaagctgtcaaaaggcctagaggtccacagataagagcctccacctgcatacctacagcctgcctgtggggatgctgtcatcggcaatgactcacttgctggaccagtatcaggccaaattaatgtgccattagtcttaagagtcaacagaaaggcccccacacccttatcccaccttccagacactgagacatcagcccgcctcctgcatgggtacaggtgaattgaggagccttccaatccaaagccaccgggtttcttgcttctgtctctttcttctttagagagaagacagtaggtttgtctttggaaagacagaggtatgacatacttgatttgtacatatgtgatttcctttagattcggtgctctcctggggaccttacctgtacagcatggtaagtagatacacatctgcaccctctgggcaaacagcccagcagatctcttctggctgtgaccccaggaaaagagatgctggatgagtttgcctatgtggttgacactgctttttagggactagtcatccacatagagttggagacccaaagcaagagctcgcctcagggacaaattgaaagaaaatcagcacacatcacttttttccagatataagaaacacatttttccaatgccctaaatttttattacaaaaattttcaaatatgcagaaatgttgaaagatcacggtgaatacctacttaggttcagttaacaatttgctgtgtttcatccaataaacatgtggcttgtaacaatacactttgatatgtgagctcccgttctccttccttcccctctttctcctacccctccctaactgcagcaataccagattgacgttcccaagtaaagtgggtctttttgctcttggtttgcattccagtctcttctcgaagacaaaggtctggcagaggtgtctaaggttgcagagcaagtactgaatgccgtaaataaggggctctacagagaggccacagagctgtgggggaaagcagaaatgatcattgaacaggtaaaaaggggaaacactcagaggcgagcctgcttggctttttctggtgggtacagggcccatggttggtgttgtcaaacttggagtctacactgaggctccccacatatctgcaaatgattgcatgctggataataaatctcttgggtctaagcagtgatgtagtggctccttacagagtcagaaagccacccaggcctgcaagacttgcttgtccttcactaaatgtatggattctattaaaaaaaaaaaaaaaaaagactgtcttgcagaggtgagtgtgtggagaaaacacattcccttattgggacccttgccaagcaacattctgactccagagagccagaaggaaagaatgcgtaggctaaggacttgggagtgtaggcccctctgcagctctgttctccctgtaaattaacacctaggcccttggttttttccctgcagggcctgatcactgctcatatgagatgctcaccactccagggagagtgggctgacacagctggtttctgagacttcagagctgcatttctttctttattttattttttactttttcttttttcctctatttatttatttatttatttatttttgagacactcgcccaggctggagtgcaatggcacagtcttggctcactgcaacctctgcctcctgggctcaagtgattcccctgcctcagcctcccgagtagctgagataattggcacgcaccaccgcacccagctaatttttgtatttttagtagagaaggggtttcaccgtgttgcccaggctggtcttgaactcctgaccttaggtgatccacccacctcagcctcccaaagtgctgggattataggcgtgagccaccgcgcctggcctctttttcctttctttcttttttatttttttttgagactaagtctggctctgtcacccacactgtagtgcagtggcccgatctcggctcactgcaacctctgcctcctgggttcaagtgattctcatgcctcagcctccagagtagttgggactacaggtgagcaccaccacgcccggctgatttttgtgttttcagtagagaggggtttcaccatgttgaccaggccggtctcgaactcctgggctcaagtgatccacccacctcagcctcccgaagtgctgggattacagacatgagccaccaggcccagccaaagctctatttctttctgatccaagcagatatacaaaattaaacctgtccttggataagataaagagccatgtgtccttctgtttggcagctttgatgataggaaaatgaaacaaacagccaaataaacttttatatttcagaacacagatggggtgaacttctataacatcttaactaaaagcactcccacgtctacaatggagtcgagtctagaattcacacagagccacctaggtgagtgaaccttgaagttattaaagtccctgcctcagcctccatgcaaaaagaaacctgtttattaaaaaaaaaaaaaactttattaacatataatttgcataccataaaattaactcactgtaagtggttttcagtatattcccagagttgtgcagtcatcactacaatccagttatggagcatttctgtcaccccaaggagatcccacgtgtctgcttgcagacagttctcattcccactcccagccacaggcaaccactcatctgccttctgtctctctagattttccttttctgaacattttatataaatacaatcgcacaatagttagtcttttgcactggcttctgtcacatagcatgatgtttttgaagtttagaaaccagcttccatacaccaaattacaacatcagttcaagactgaatttagtcatctttcagccaaccaagaagcatataaaggctgcaggataccctaggttccactttctagatgattctctttggccgttctggagaatcccaatggcccccaagtctatagaatgtataatcaatactattaggttggtgcaaaagtaactgtggtttttgacaggtttcaagaattattaactcacaactaatgaagcattatttcccttcccacccagttccctaccaaccccttattttgaaccaattttgacaaatctattttttccctttttttttttaagagataaggtttcactctgttgcccaggccagagtgccattgaatttgagaaattctgccattacttttaatggcaaaaaccgcagttacttgtgcaccaacctaataataaagcctctccactttcaatgtgtttctgacttccttcctcccgctgggggtgaatcaaggtgacgcttttccttttccagctgaatctgaaaccctccctcttgctgtgcagcatccccagcagcttggtaaagatgtcctcatggccaggcgtggtggctcacacctgtaatcccaccacttgggaggctgaggcgggtggatcatgaggacaagagatcgagaccatcctggccaacatggtgaaaccctgtctctactaaaaatacaaaaatgagctgggcatggtggcgggtgcctgtagttccagctactcgggaggctgaggcaggaaaatcgcttgaacccaggaggcggaggtttcagtgagccgagatcgtgccactgcactccagcctggagacagagagagattctgtctcaaaaaaaaaaaaaaaagatgtcctcttggccttacttccagccctttgactcactatctaccagtttggttttagtttgtctttgtcagcgccacgtgagacacctacaacgagatgccttaagccagctcatgaatggccccatcagaaagaagctcaaaattattcctgaggatcaatcctggggaggtacttatatgacctaattaagtgccgtttgtacagttatggggagaaaagaggtgcaaattcagagacctgaatttgtagggtgggttttgttgttggtgatgataggttataggtaaacaatattactatccacgttttgtaggtgagcaaatagatacagagacagtaaatgacttgtcagggctggatgcagtggctcacgcctataatcccaccactgtgggagactgagttgagaggattgcttgaggccacaattaagcaacatagtaaagccccatctctttaaaaaaatagaaaaattagctgggcatggtggcatgtggcatatagttctaactacttgggaggctgaggtgggaggattgcttgaacccaggagtttgagggtacagtgagctatgattatgccactgctctccagcctgggcagcagagagaaaccctgtttcttaaaaaggggaaaaaaaagacatcaaaattgattcaaaataaggagttggtagggagctgagtggggagggaaataatgtgtaattggttgtgagttaataattgttgaagcctggtatgggtacatcggagcattgtatgcttctcctttctatccatttgaaattttccataataaaaaattaagataaaaaagctacatcgaaggccacagttggttgcagatgagatttcgcgccaaaggtccttgcaggatgtcagagacacccaggtgctcgggcagattttgaccagctctctcttgctgacctccccaggcatcctgatgctggatatggccaggcattactgcgttctggtctcaaggccatggtgaggaaataatgaaatccttagagaccagggccaggtagaaatcttggttaagttcctactttagtcctatagggaggccttgagcaagcagagatctcaggtttctgaagggaaaatactccaaacctaagagggttttgtttcatgtgtgttcaagataccccaaggatatggggtcagtggtcctgcggctgctgctgggagcctacgatttgctgctgctgggagctttctcaggggacatgggccctcctctcccaacctgcagtcaccagaggtctcattccatccctggttttttcattactcctgagtgctgggagaattttagaaatgaagaaaaattagctcaaatgaaaagagctgggtgtggccgggtgtggtggctcacgcctgtaatcccagcattttgggatgccaaggtgggcggatcacctgaggtcgggagttcgagaccagcctgaccaacatggagaaaccctgtctctactaaaaatacaaaattagctgggtgaggtggcacatgcctgtaatcccagctacttgggaggctgaggtgggggaatcgcttgaacccgagaggcagagattgcggtgagccaagattgtgccattgcactccagcctgggcaataagagtgaaactctgtctaaaaaaaaaaaaaaaaaaaagagctgggcgtggtggtgtgcatctgtagtctcagctacttgggaggctgaggtgggaggatcgcttaagcctgggaggtagaggctgcagtgagctgagattgtgcccccgctctccagcctgggtgacagggtgagactctgtctcaaataagtaaataaataaataaaaattaaatttttttaaaagaagacttcttatctcccaaggtaatgaagaagaaaatgggatgttgcttgtcagatgcctccttggcagtgactagcaaataatggtggctgccactcttattgctgtcattcagtgttaggataatgctgatgggcaggagctagcaagagtactagctcctctcttgcctggggcttgttattcatttggctttcctgagggccagctctgaattggtttaggtttgatctggtttattataaggtaggcctacctgttcagaacttgaaacttggccctggtgttactcaaaaaaacaggaaaactgacattggcccaaagcacaatttattccctgagtgtaccagcctaatgagtatttcctgggcctctccctccctgtttccttggacagtagcctattccaggtgtcaattcctcattaaaaatggtgcctgctgtcatcacaagctctcaagagaatggaccacatgtgctatttatgtgtgccttacacctgaccagtcggcacaaatttctgggctggttcatccctgtttgtgaagcatctgtgcattcagtcgttgttcggtgctggagcccaagatgctctgggctgaaaggtacctcctgttttggcagattccaagctactccctctttctccttccccatgtgcaggccaggctaccaacgtctttgtgaacatggaggaggacttcatgaagccagtcattagcattgtggacgagttgctggaggcagggatcaacgtgacggtgtataatggacagctggatctcatcgtagataccatgggtaggaattgactctgagaggcacctagaggcagttttatgggttcaactggaagggaactggccttggacatgtcagtcttgcggtgggtgatgttgaaatgccaggtggaaggccatttcccattacatccgtctaccccgaccttgattattcaaagggtggggagctgcacgtggctgtgacccctcagaagcctgagcctacctgggtttgggggcccttaggtatgattaaagaaaagaacaccacctgtctctaccacaaaacttagacattttcctggttattgggcaaatgcgctgtttaattaagggagagcctcatttttgtgcgacatcacagtcgatgttgaccactgcagagtgaattaaaactaaaccctaatgactgtaaccctgaagacccaggggaaatggtctttgtggaatcctgactcctgccctatcacctaccacctgtttaatttgctcacttccaaattaaatagggcctggtggaggctcagagacaggttctctgaactggcagggtaattgaggcacaaggtctgacggatgtgacacgcctcgtgaaccagaaggattgaatatttttgtgatgggtaaacaagagacaccaaggacaatttggaaagctgctgcatttctcgatgaacatcccaggtgatccttatcactatctcgttcacgacatctctcagtcctcctcacaggcctgtctgcctccagaggtccccagttcccttcctaaagagcagatggcggtgagagatgcagaggcaaaatcagtcaggctttgcagctgttaggtttctcccagcagcctaggtttcactgggagtcagaaatgcagatgctcaggccctaccctgatcttctgaatcagaatttgcattttaacaagatcctgagtgagtttcatgcatattgcagtttgggaagcaccaacttttaggacctagacttttttcctattctatccagctgttaatgccaggcctttctctttgtccttctcaccaggtcaggaggcctgggtgcggaaactgaagtggccagaactgcctaaattcagtcagctgaagtggaaggccctgtacagtgaccctaaatctttggaaacatctgcttttgtcaagtcctacaagaaccttgctttctactggattctgaaagctggtcatatggtaagaaagagcttttgttccagacttaaaaatcatcctgagagggaagccacaggcggttattatgcctctgtccactgcccaggtgggtcttgtaggaagtacgagggcccgagggccaggtacagtggctcatgcctgtaatctcagcactttgggagaccaaggcaggtggattgctggagcccaggagtttgagaccagcctgggccacatggagaaaccttgtctctacaaaaaatatgaaaattaggccaggcacagaggctcatgcctgcaatcccagcactttgggaggctgagacgggtggatcgcttgagctcaagagttcaagaccagccttcgcaacgtggcgaaaccctgtctctacaaaaatttaccaggtgtggtagcacatgtctgtaatcccagctacttgggaggctgaagcacgagaatcacttgaacccgggaggtggaggctgcagtgagccgagatagcaccactgcactccagcctgggcaacagagtgagactctgtctcaaaaaagaacaaaaatcaaccgggcacggtggcgcatgcctgtggtctcagctgctcaggaggctgagtgaggtgggcagattgattgagcctgaaagttagaagctatagtgagccaagatcatgccactgcactccagcctgggtgacagagcgagaccctgtctcaaaaaaaaaaaaaaaaagaaaaattaaaaaagaaatacttagggcttgggagtgttttgagtttcctaacaaaattccgctattagcactagagactgcgagcacaagggtgagtggtgcccagtccctgtcctcaaggagcttgtggtctagagacagacaggcaaggagactgtcaacagctggcttggcccagggaagggtgccctgcccaggcatgcagatctggaagattgtgccccacgtgatgcgtaggagtgatttaaggaaagaggaggaggtggggagcatggagagcagtgaatacaaggtccacaggagcctcagacagcgaggacttggaatggacactggagggaggtggctgcagagggggaattttcataccactctaaggagttcagacagtagggcaccaagcaggggttttaagcaaaggagtgaaattaacagatttgtccaagaaataccattctagcagtagagggcatggggcaagcctggggccaaagaccaatcaatgaggctgtcaggtaaatccagaaaggaggaaagtagatggatttggtgaagtgtaaagaagggaaaattggcaggacttggtaatcatttggggtagaaaagaactgaagggtggcttgcaggtttctgctccagcattgtggtttgcgatggagggaatttgcacaagctgagtttgaattgcctatagaacagaaggcagaagaagagcctacaaatgagactgagaaaggagcagccagataagtgagaagggagaccagggatgcgtggcatccccaaagcagggaggggcccgcagtgctaagtgagaactcaggggaagggctgaaacgtgagtgatgatgtgcttacaccgatgtccttggcacctgcgttggtgagatattttggtgaggtggcaagctcagaagccagattggaaagactggagaaaatgaatgagtagtgaggagaagagacagtagcttcctttaagaagccagagaaagcagcccactctcaaaagacacttaatctaggctgggtatggtggctgacacctgtaatcccagcattttgggaggcgaaggcaggtggatcacctgaggtcaggagtatgagaccagcttggctaacatggagaaaccctatctttactaaaaatacaaaaattagctgggcatgatggtgggcacctgtaatcccagctactcaggaggctgaggcaggagaatcgcttgaacctgggaggcagaggttgcagtgagccaagatagtgccattgcatccagctggcgagatagcgccactgcactccagcctgggcaacagagtgagactctgtctcaaaaaagaacaaaaatcaactgggcgcggtggcgcctgcctgtggtctcagctgctctggaggctgagtgaggtgggaggattgattgagcctgaaagcttgggtgacagagtgagactctgtctcaaaaagtaaatcaataaataaacaaatagacttaatctaaagggagaacaaacaaggcagcagggcacagagggagagggcattatttatggctctcaggatctgagtaccttcaatattgactaaaagaaagaaaattagaacgtcttagagcaagcactgttacaggttgagtaccccttatctgagatgtttggaaccagaaatgtttcagatttttaattttttttttattttggaatatttgcatatccataatgagatatcttggggatgggacccaagtctaggcaatggaattcatttatgtttcatatacaccttatacacatagaccgaaggtactttcgtacaatattttaaataattttgtgcatgaagcaaagtttgtgtgcactgagttattagagagcaaagggtggctatttcagccacccatggctcttcaaccaatctgtggttgttaggcatcatatcatttctgactccaaatttatatgctgccgataagcaatctttttcttgcatgtagtcacacataagtacttcacagtaagaaatacaacataccattaatacagtggaaaagttgtgtgttcagagtaactgagcagcacagtagcatgaccagaatacctgtgtcagctgctagacaacagcaacagcaagcaacagcagctttcggtctctacctacaatgctgtgttttgattaaaaggttactgtactgtaacccccttggggatgcagaaataaactgtgtgttgtgcgcctgcattttgaatgcagccgcccatggggcaggtgtgaaatgttccacttgtggcctcatggtggcactcaaaaaggctggaattgtggagcattttggattttccaatgagggatgctcagcctgccctagagagaagtccctgacgaggctggtaggaaggcatggaacaagccaaccacgcgctctgtatactagagttcaggcccatttcctgttggtttgtcacatatagaacaacagatcagttggggacaggcttaaaatagcccttggagactgttgttaagtcgtccccaaaccacttcccctttcattgattaaatgacattttaggataacccaccttgcctgtgcctcctggggactcttggcagaagagtcaaggatgggtgtgccatagagaatcatggagccagggaattacataacggggagaccatatactccaaccccttctgtgtagggagaaactgaggcctctgcccttcccccttttgatgctgtgtgggaaggaaattttaaaggacttattctaaaaatctgagggaaaacaaaagaaagttgaataactgcgaaaatcggatgccacccaaagggccctgtttgtttttattatttgcggctctctgctgtgagctcccttctcagccatttctctattctcaatccgggatcccttctagacagatgcctttaaaatgtttagaatcttccttcttccttgaacaggctaggtctagtatcattagcatgacccttaccaagaaatcaacagatcagctccaaatggagtagaaggttcttgtcttaaatgctgacttctccaggtccctgccacccagcccagtcagggcccagaagagctttcatccagtgcaggagtcattttcaggaaggaccctctctcagggatgtgcccaggtgtctgcacaggttgctgtcacagagctggctcccttttgggagcaaggtttcaggatgttgcctctgaccccagccccaggaatagcaccaggagcactaactcagatgttgtttttttctaggttccttctgaccaaggggacatggctctgaagatgatgagactggtgactcagcaagaataggatggatggggctggagatgagctggtttggccttggggcacagagctgagctgaggccgctgaagctgtaggaagcgccattcttccctgtatctaactggggctgtgatcaagaaggttctgaccagcttctgcagaggataaaatcattgtctctggaggcaatttggaaattatttctgcttcttaaaaaaacctaagattttttaaaaaattgatttgttttgatcaaaataaaggatgataatagatattattttttcttatgacagaagcaaatgatgtgatttatagaaaaactgggaaatacaggtacccaaagagtaaatcaacatctgtatacccccttcccaggggtaagcactgttaccaatttagcatatgtccttgcagaatttttttttctatatatacatatatattttttaccaaaatgaatcattactctatgttgttttactatttgtttgacatatcagtatatctgaaacaccttttcatgtcaataaatgttcttctctaacatttttaatggctgtggagcattctactttatggttgtactctagtttatttacaaaattcccagttgtttccgacaagtataataatttctagtttgttgctattatacatagtgctctgttgattcaccctgatagttagatttttttgtacctccttattttcttagaataaattcataaaagtgtaattatttagtcagaggattgccacatttccttaaaatcaaaataattagctcaggacttttaactttttattcatagctcaagatctacataaggaggtttgatgccgtggctcacacctataaacccagcactttgggaggtcgaggcaggaggaatgcttgagcccaggagttcaacaacagcctgggcaacatagggagaccccatttctacaaaaaaaataaaaacattagccgagcatggtggcacacacctgtagtcccagctactcaggaggctgaggcaggaggatcacttgagccagggaggttgatgttgcagtgagccatgatcaagccactcactccagcctgggtgacagagaccccatctcaaaaagaaaaaaaaatctgcataggggatctaacagcttctaggactgtctgaaagaaatatcacctcttgtagttgcagggctgagattttatttatttatttattgagactctgtgacccaggctagagtgcagtggcacaatcatgcctcaaatgatcctcctgccccagcctcccaagtagctagtaccacaggcaagcaccatcacatccagctaatttttaaaattttttcgtagagttggagtctcactatgtggcccaggctggtctcgaactcccaggctctagcaatccacctgccttgggctcccaaagtgctgggattacaggcatgagtcaccaagcctggccaaaggctgagatttaaaaaaacagccaggcacggtggctccagcctgtaatcccagcacttcgggaggccaaggcgggcagatcacgaggtcaggagatcgagaccatcctggctaacacggtgaaaccccatctctacacacacacacacacaaaattagccaggcgtggtggcgggcacctgtagtcccagctagttgggaggctgaggcaggagaatggcgtgaacccgggaggcagtgcttgcagtgagccgagatcgcgccactgcactccagcctgggcaacagagcaagactctgtcccaaaaataaataaataaattaattaattaaaaaaaataacaaacccaaagcttattcctgcagactgtgaggaaacagttaacagcaggttatgtctacgtgactaaccccttcagaccctgagactaaaaacaggctcctgggacagagactacacatgtccctatggttcactgttggcaagaactccagtgtgcccatggaaagcaagaaccttagaagcctgtgctggatacccctggacatcacccatgtgtatcgtttttacctgccgcttttgatatgcatcttttgttacaaaaatgttagctattagtataacctgctactgagccttgtgagtcttggtgaaccatccaacaaagcagtgaatcataaagcaagttgaattcccaacctcacagagtctcttctgttaaaagttagtgcattgattgagaagaaatgtaattctgaacattgagatgagtcacctgcacagatgaagctaggggacctcaaacctttttggccattagaagccgcccttccattgctgtccgggcaggttaatcatgtcttgtcctaagatcttgtagtaaattcctagacttgcccagggctcttattcctgctgtataacattctctctcaacccacacccctaccttcctagggaatccctgtgatcagttgacaaaggaagacaactctcaggcttgatttacagacggggctccacagtatgcatgcatcacctgaatgtggaccgctatggcaccacggccacactccaggacagccctgaaagatggtgtgaagagaaatcctcccagtggacagaacttggaacagtgcactcagctcttcactttccctggaaggggaaatgaacagaagaataagtgcaccaattcatgatttagctgggtatttagggacttggaagaaacttgattagaaggctgggcacagtggttcatgcctataataccagcactttgagaggctgaggtgggagaatcccttgagtccaggagttcaagaccagcttgagcaagatgataacaccctgtatctacagaaaataaaaacattaactcagcatgttggtgcacctctgtggtttcagctgtgtaggaggctgaggtaggagaatcacttgagcctggcaggttggttgaggctacagcgagccatatttgtactccagcctgagtgacagggtgagaccttgtctcaaaaagaaaaaaaacttgattagaaaattgatgacaagaagctctgaggaagaggtatgagattagatctctgaatggccgagtatgaagatcattgttttccatctgaatactcaactagggcaagggaagattttaataatcaggtgggtagatgacccattctgtggctattagcctccttcagccattcctgtagactcatgaacaaagtggccatggcggcggggatggaggctatgcatgggcttggcaacatgtgcttccacttactaagggtgacctggtcacagccactgctgagtgccccatctgccagcagaagaaacaacactgagcccctaatgtggcatcactgctgaagagatcagccggctacctggtgttaggctgattacattggaccacttttattatgaggcaggcagcactgtgttttcaatggaattaacccttgctctggacatagatgtgccttcctttcccacaatgcttctgccaaaactagcatctgtggacctacggagtgtctcatccatgactatggtattcacagcaaatgaaaggcagcagtgaatttacacaagtggaattgactgctctcaccatgttccccatcctcttgaagcaactgccctgacagatggttgaatgactgaaaattcagttacagggccagctaggaggggatagattgcagggctggggtgctgccctccagtatgtggtacatgctctaaatcaaccgccttgtttctcccatacccaggattcatgagtccagttatcaagggataaaaatgaaagcgactcctctcactgttaaccctagtgatccagtggtagaatttttgcttcccatccctgcaactttaggttttgctggtctagaggtcttagttacaacgggagaaatgttttctctaggagacacagcagataatccgtggaactggagcttgaagccaccatctggcctctttgggcactgcatcaacaggcaaagtgctgtctgcagtgattgatctgactatcaagaggaaatggggttgctcctacacaatggacgtaagaaggaagaatgcaggagatcctttggggcaccccctagtactgccatatcctgtgattaaggtcaatggagagctacaacaacccaattaagaccgctaatggcccagacccttcacaaaagatttaagtcattccatcaggcaaaaagccacgaccaactgaagtgcttgccgagggcaaaagatacgcagaataaatcatagatgagggcagtcataagtactatgaccttgtgacccactgtagaaacgaggactgtaataattatgagtatttctttcttcttttgatgtgaatctattttaataaatattaacaaaaaaacttttttttttgagacagggttatgctctgtcaaccaggctgaagtgcagtggcacaatcacagctcactgcagccttcaccccccacctccctgggctcaagtgatcctcccacctcagcgcccccagtagctgggactgcaggcatgcaccaccatacccagctaatttctgtattttttgtagagatgaagttttaccatgttgcccaggctagtctgaaactcctgggctcaagtgatctgcccgcctctgcctcccaaaatgctctgcctcccaaaatgctgggattacaggcataagccacagctgcatctggtgaaccaaatatttttgtttttatctctcattcctttatcgtctctgatgtgctaatagtatttaaccttttttgtttttcttttttaagacagggtcttgctctgtcaccgaggctgcagtgcagtggtgcaatcacggctcactgcagcctcaatctcctgggctcaaacgatcctcccaggtagctgtgactgcaggtgcataccattgtgcctggctttttttttttttttttttttttgagacagggtgttgctatgttacccaggctggtcttcaactcctggcttaaagcaatcctcgcagcttggcctcccaaaatgcttgtacctaactttacatataaatatttatattacaagatgtcaaggaaggaatgtgaaacagctagtaaaagaatgagcatcatccaaagacaaaaagtggactctgattctcttctggggaaaaagatgtgtatttctgggtataggaaggacagttgtgtcatggtaagcagagtatgactttgttattgactttatttggagattaagtgtggtttaaggcaatgttatgggtgccaagttgacaaggggtggactgtagtgtttttgtaatgtttcaacttgcctaggctaactttttcagaattacctttcttgtatgtttctgattagggtggcccacaagagaaattcttcggaaaatgtggagggtgaagtgaagcagcaacagtttttcattcatgcatgttatcgtttttctgctggctcagctcagctgagctcagctgctcccccttcccccggatcctcctagagcatgtctgcttcccgggccaggtgagtgtgcttagcactaagagggacccaagaactgacatgcgtttcagtcccatggactccatctcttgcttgtgggattcacattgttcttgtccttctccactttacattccttgttccttcctgactgcttgccctgtgtacttcaatctccagcatcagatttggagacaaaagccttatgaagacttcttaaccagctccacactgcataagtcaaatccctgttacaccttcccccatacgcacggctgtgcacatgcaaacacgcacacaccgttctgcttctgaaattgaatccttttttatttttgagatagagtcactcaggctttagggcagtggtgcgatcacagccgcctcgaacttctgggctcaagccatcctcctgcctcggcctcccaagtagctgggactatcggtgcgtgctaccactcccagctaattcttttatttatttatatatttatatatttatttatttacttattttgagacagagtctcgctctgtcaccaggctggagtgcagtggcatgatctcggttcactgctacctctgcctcctggattcaagtgattctcctgcctcagccccccgagtagctgggattacagacgcgtgctatgatgcccagctaatttttgtatttttagtacagatgagttttcgccatgttggccaggctggtctccaactcctggccttgtgtgacccgcccgtcttagcctcccaaagtgttgggattataggcatgagccactgcacccggccaccagctaattcttttttaagttttatttttgtagagacagggtctggctatgttggcctggctagtctcaaactcctgccctcaagcaatccttccacctcagcctcccaaagtactgggattacaggcagggaccactgtgctcagctgctgattgaatcctgattgatacaaaactttattattttaatggcttcaaaattctccacaattggaatctgcatatctgatgtctttccgttgcctatacttgtgagcaacaattgatcagatactctcaaatcacatcgttcttagtgttgccacctaatgttgctgagaaatttgaaaccaattcacttctttttcatctttgtaaataatgagtttattttattttattttttattatttatttatttatttattttgagacagggtctcactctggttgcccaggctggagtgcagtggcgtgatattggctcactgcctcccccatctcctgggctcaggtgattctcccacctcagcctctaaagcagctgagactgcagaggcctgctgccaagcccggcaacttttgtttgtatttttagtagagactaggttttaccatgttaccccaggctgatctcgaactcctggactcaagctattcgccctccttgggctcccaaagtgcggggattacagatgtgagccaccacacctagccaaccagtttaataaatggttgctgtaaatttttttttttttttttttgagacggagtctcgctctgtcgcccaggctggagtgcagtggcgggatctcggctcactgcaagctccgcctcccggattcacgccattctcctgcctcagcctcccaagtagctgggactacaggcgcccgccactacgcccggctaattttttgtatttttagtagagacggggtttcaccgttttagccgggatggtcttgatctcctgacctcgtgatccgcccgcctcggcctcccaaagtgctgggattacaggcgtgagccaccgcgcccggccaaatatttttgttaaattatgtaaaccgggaacgtctgatggttacattgatgtttagcttttaatgaattttgcctgatgtgtcgtgagcttttagatccccaggctctgatcttcagttcagcaatgctttccagtatttatttgaatattgttttaagatattttcccactttgttgtcctttagctttcattctagatactttttctccagactcccgtcaacatcattacttcattttcggtaatgtcactctagactttgagtttcttttttttccttttcctttttttttttttttgagacggaatctccgtctgtcaccaaggctggagtgcagtggcatgattccagctcactgcaacctccgcctcctgggttcaagcaattctcttgcctcagcctcctgagtagctgggactacaggcgcccaccaccacgcccggctgatttttgtatttttagtaaagatggggtttcaccatgttggccaggatggtcttgatctcttgacctcgtgatctgcctgcctcggcctcccagagtgctgggattacaggcatgagtcactgcgcccggctagactttgagtttctaaaggattcttaacttctataattatctttctccttaatttattttccctagttatgccagctgctgtttcaccttatcttttcatctcattttacatttcttatttcacaggctcccggtttgctttaatttccttgagagcgagaaaagtatttgtagtttcccagtgcaaagcttccaagggatgttcctcatttatcttttgtgctttgtgttaatttcctccattttagttgcaggtgttttttccctatgtttatgtgtttgcttttttatgtgtctgtatctttgaatgagggcagttatataatcatctaattgattatctggttatttttcagattgtccacttaattcttattcaggaagcctagatgtggcggagctatatggtcctcacagttcttcagttgcctaagggcggtgaatgcccagctcttggataataattattgggaacttatttcctgtgtcccttaggacttagggagtgtttccttcctaatgacatgagtgctcagaatttgttgtgttcccagcttcaggatgaacccaaaactttggtaagatgcaaagtccatgataaatccagggactccttatttgatgaatatattagttatctattactgtataaaaaattacgcagaaggccaggcatgctggctcatgcctgtaattctagcactttgggaagccaaggtggaagggttgcttgaagccaggagttcaaaacaagcctggttaatatagcgaggccctgtccctattaatttttaaaaaattaaaataaataaaatacccagaaacttggtggcttaaaacaacatttattatctgacggtttctgtatgtgaggagtccacctgtggcttagctgggtcctctactttaggacctctacaagactgcaatcaagggttggccagggcagcagtcatctcaaggcccaactagggtagaatgtggttccaagttcagccatgaggttattggcacgattcgcttcctcataggctgttgggctgaaggactcccttaattacttgtcatgtggacccttccatgggcagctcacaatatggcagctggcttcatcagatagacacagagaaagaaagagtgagagagccagagagagagagcatgggcaaatgtgcaagacaaaggtcacgatctttttttttttttttgagacggagtcttgctctgtcccctaggctggagtgcagtggtgcgatctcggctcactgcaagctccacctcctgggttcacgccattctcctgccttagcctccccagtagctgggactacaggcacccgccaccacacctggctaattttttgtatttttagtagagacggggtttcaccatgttagccaggatggtctcaatctcctgacctcgtgatctgcccgcctcggcttcccaaagtgttgggattacaggcatgagccaccgtgcctggcctaggtcatgatcttttataatgaaatctcagaagtgacatcttattacttttgcctcttctttagaagcaagtctttagggaggacttagaaacaagaaaaggggaagaaatcttttctctcccagctcctcaaccctcaacactgaatgttccatgtgcctggctttctggaaacctcctgccccttctacctagctgctttctgatttctcttcagctctcagaataaatatgaatctctcaagaagccctctctgatcccccaagctaaggtagaaccctgttttgctcactctctaagcactctacctgtactttgtaatcctcagtcttcttaagacagagtagaaacagggctcggtttcagctcacctgctctagagcattctttcatgcatccccactgatcccaaaacccacaccactacctcactcctcttttacttaaagaattccagcatggttcttaggagataatgaaggttgtggagtgtcccacctagggaagggatgctgcacaattgatttgcagccttgttgctgcaggccagaccaccaagtggcccattactcaagatagccatcgcaactagatatgctgccttgcataccccacccctcaccggctttgctcagcccagcctacataacctaccctgctgtcaatgcccatgctttgcataataaaaaaagccctactggctctctatgcctcgcttacctcaggacataagctccaaggaggccttgtctgggaaaactttttcaggctcaggtcaatttctattgctttgagagcccaagaacccatggttggtaacacgttctttgagggctcatctgggatcaggctacatggggagatttttcttctgctagtggggagacttgagggctgatgggactgctggacaatatcccttagtggctgacagcagctgcctgaacttttgactcagtgtcaccacaatggatcagtctccagccccttggaacacctcgcccaaacctcaaggcaacacttttctcccttccttttctctgtctttcctatcccttttctatttttttctgtcatttggggtgcttcgcccctcctcttctaatcccttctggtttgggttgccttattagacatccatgagggatgggttgacatgattttcctgatttactggtctgggtcacttgaataaacatccacacaggatgaattaaaagggttgaccatccagttctggttaacccagcaggcagtgggatgagtcacacccatcccctggcctaaattgatttgagtttaagtcccaagaatctctctctctctctctttgggagtctgtccaaatgtgtagtcctgctggtttggggagactgcccgagacagggtgccagaaacgcccagctagctttcaggaaggcaccagggaggcctgggtgtgacggtcagtattggttttctaaacactgaggaaagttcagaacacaaaccgttaatgtcaagcctctgagcccaagctaagccatcatatcccctatgacctgcacgtacacatccagatggccggttcctgccttaactgatgacattccaccacaaaagaaatgaaaatggcctgttactgccttaactgatggcattatcttgtgaaattccttctcctggctcatcctggctcaaaagctcccctactgagcaccttgtgaccccccactcctgcctgccagagaacaacccccctttttcctttacctacccaaatcctatgaaacggccccacccctatctcccttcgctgactctcttttcggactcagcccgcctgcacccaggtgaaataaacagccatgttgctcacacaaagcctgtttggtggtctcttcacacagacgcgagtgaaagttaacttactacaaaattaagaaatttaagaggctttggcctgtggttctaagatagtgttatgggatctttggggtgtcacttttctggctggaaacctctgtgctggtggcccctttgaccgggttcttgtcctgagtccaggaagaatgaggtacagagacaagtggaaggtgaacaagataaagaggagctttattgagtgttacaacagctcagaggagacctgcagtgggtagctcctctgtaggcaggtcttctcgtcgggtgttcagctctcagcacagaggaggccctcaagagggaagctccactctgcaactggtcatcctgaagtctgtggctctcagcagagagggtagctcctctctgcagctgatcatcctgtcatctccagctctcagaagagtgggtagctgctctctgcagctggtcatcccatcatctctccatcctctgccctgctctggctgagccccgggcttttatggatctcagagggggaggaagtgtatgccgattggtacatgggccaactcagaagaggcaccacaagtccccactcctgggggctcaggaaggcccccctgcccttttaggctcagaagtgcctgcccttctgccggtcttctccctgctgttggctcccgctccaattctgccatgatgcctgttagagacaaactgctccaaaaagcttcttggtgctgcccgcccctccccactctgcaactcctctccatgctgccccaagcctctttacatttctaagcccttatctaggcactgcagtgaacccggcagactttacctatcaggacttgctgctataaagcaaaccccaattacaaaccatccagaccccacagggggaggtcatgggaagcatcaacaaactttacctacatcctccggtaccataaatgtcacaggtgatatgtggcagagttaaccaacaaacgaccctggggtctctctcccccatataaacccctcattttgtaaactcagggctgcctcctctgtctgtaaccgagcagccagcaggttcaataaacttacttgcctgaacttgggtctctctctctcgtcctttctctcagctgaccttacaatgcccggctaatttttgcattttttggtagagatggggtttcaccatgtgggctaggctggtttcgaactcctgatctcaaatgatccacctgccttggcctcccaaagtgctgggattacaggtgtgagccactgtgcccacccaaagcataacaatcttttttttttttttttttttttgagacggagtctcgctctgtcacccaggctggagtgcagtggtgcgatctccgctcactgcaagctccgcctcccgggttcacaccattctcctgcctcagcctcccaagtacctgggactacaggcgcccgccaccacgcccggctaatattttgaggttttttttagtagatacggggtttcaccatgttagccaagatggtctcaatatcctgacctagtgatccgcccacctcagcctcccaaagtgcagggattacaggtgtgagccaccgcgcctggcccaaagcatagcaatcttaaaagcatgtatcgttatgaatattgggacatctggactttccatcattgtaagaatgtgtcttttgcaggtatcttcaagctgtttcctgaactgtaaacatctcatgactgtgagttgtgacaagcatggaatgcgccttgttagtctcaagatgagctgaactcaaaatggcatcaccctggctctgctatgctcctatttccctaacataacccccaaaattataactggacagatccctctcaaaatctaaggttttgctcattttgcattgcattacctgatcatcttgactcttggaggcatcaaaaattaccttgcattataaaaaaaattttagcattgatgtttaatatctaggtaggaaatagtctcttttgactccatggctcatatccaggtgatgctgatgcaaggggtgggctcctaaggccttgggtagctccatccctgtggctctgcagggtccagcccccacagctgctttcacggtaggcgttgagtgccctgggcttttccaggcacatggtgcaagctcttggtggatctaccattctagggtctggaggatggtggttctcttctcacagctccactaggcagtgctccattgaggactgagtgtgggggctccaagttatcttgggacctccaaaggagaattcacccatttcatataggcatttgcaggcagagataaatccatggctgggctccaggctttaaacaatctaatctgagattcttacggaacgaagttctagcaaagccaatttaaaaagagaataattatcttgctgcactttatgcaaataatcaggccaagtataatatgactaaaacttattttgcaaacacattggtcctaccatgacttgtctttgattaaaaatgaaagactggagaaaaaatattataatacacctgctattaggttctagtcttgtctgttatttttgagttttttaaatatgatttttacaacatggactgaatcttaaaccttttctgggctgcaagtctcccaactaatgtttggaaatttttcttccatttttctaacttaaacttgtgaaaagaaaataaaaacttgggaccccaatttactataccaaagggacaaagttaagctgaaactgagtcatgcaagaaactgcctttccttttgtttctaagcagacagctacagataaaaggttaagtatctccacaggtcactactctatgttcaccttatcttatgcaaagttctgtcttactgagggcaagacaaatacataatttactattcccctacctgctccttttctcttgcaacatgtgattcagtaacgtgaccataccctccctcttcgcttccagtccacttttctcctttacatatcgaagccctcaaaatcatctttggagaaagacacagacctctcttctgggtatatccttaaccttggcaaaataaacttctaaattgattgagacctgtctcagatactttttggtttacaaactcaatagaattgctactacctttttccgaaggccctgcaagctgaagcttattccttgtgatacacgtgataagagcacgtcagattgtcactgccttcctcctctgtaactaagatactttgagtctaacatctggatagattatgcccactattaacatttgtttttctcctgtttattccatttttgggaagtgccttttattaaaagtctgtttgctttatacttcaggcaacaggagactggctctctggactattcacctaaattaacggcatctgatctcttataagaattatcgaactctttgggaggccgaggcgggcggatcacgaggtcaggagatcgagacgatcctggctaacatggtgaaaccccgtctctactaaaaatacaaaaaattagccgggtgtggtggtgggcgcctgtagtcccagctactcaggaggctgaggcaggagaatggcgtgaaactgggaggcagagcttgcagtaagccaagatcgcactgctgcactccagcctgagcgacagagcgagactctgtctcaaaaaaaaaaaaaaaaaaaaaaaaaaaaaaaaaaaaaaaaaaaaaaaaagatcaaactgagcttaagcatgttattatcactgggtattatttaattttttaaaataattatttgttatattcaataggagtatggatggttaaaatttatgtcttccaggtttcaacagtgcctagtctctataggtctttagagcagtcaggaagagatctccatgccctgcacggttaggcgggaagtagcttcagcaggaagtagcttcagaagatgagatctttggacctttctccttaagaataaggagagtgaaatctctcagtggctaatgagacagagtagtaatggggctgagcttcagctcacccccactagagcattatttcatgcatcctcactgatcacaaaacctataccactacttccctgatgccataatgtttgagccatgcctttcactttaagaattccaggagctggccttaggcagtttggttccaagaacagaatgtgtcttactcagctttacatctctagcacctggaccagtgcctgccacatagcactgggtaaatatttgtcgaactgaactaaattgggagtatcacacagagaacctggagcttgactaagaaattgagaaatgcatttccggttaatggtttccatcaagtttcctttgggacttaagtgatatgagatatccctttcaccatgcaatccaccccagacattgatgagcttgtcttaataaataatggttcacctgtctcttgcatcactctgagacattagatgaactcttgccagatgcagcatattccttgtatcatctaaagagttatgtccattagacattagcgttggccaacttgaaaatcttgggttacagttttttttccattatcttttttttttttaaacggaatctttctctgtcacccaggctggagtgcagtggtgcaatcttggctcactgcaacctctgcctcctgggttcaaggattctcctgcctcagcctctcaagtagtggggattacaggtttatgccaacatggttggctaatttttgtatttttagtagagacaggatttcaccatgtttggccaggctggtctcgaactcctgacctcaagtgatccaaccacctcacctcccacagtgctgtgattacaggcatgaggcactgtgtctggcctctttagagtcttgataaatagttttactaaagcaggaaaaataacttcttttagtcatgttgttttaatagcacctagtctgtcctgctgtaacagaatacctgagactttatatttacaatatttatttataatcaacagagatttattggctcatggttctagaggctgagaagtccaagactaagtgatcagcatccagtgagggctttcttgctgtgtcagcctgtgacagaagaagagacattgagagagagaaagaatgcaataaagtgactgaactcatcctgttatgtggagccccctcctgcattaatccattcgtgagggcagattccttatggcctaatcgcctctgattaggtcccacctcccaacactgttgcattgggagattacatttctaacacatgctttttggggctacattcaaaccatagcacaatgcaaatcctgaagctattgacaaagcaagcggggaaagtcagcaatgcccttattagaatgtattctggatcaccttgtgtgatactgtgatttataatgagaaatatatacttgaacttcaaccccatttctgatacagagctcctacaaccctgagaattttctaagtggtaaaagtgaaaaaagcatcttgattttcctaacaagcccctttcaaccacactaaagtatatgttaattaggtgacttttggaaaccccctctgggtgggggactggttgccaagaagccaaccaagtgattagaggattacaactttcagccccacaccccacccccatctctaggggaggggagatgaagctggagattaggttcatttcaatggccaacgatttaatcagtcatgtctacataatgaagcctccacaaaaacccaaaaggaccagatccagatgggtgaggatgtggaggtgccgagagagtagcatgcctggagagggcatggaagctccacaccccttcccatacaccttgccccatacatctctttcatttgggtgtttctgagttgtatccttttataacaatctggtaatctagtaaatgaagtgtgatatagtttggatacgtgtccctgcccaaatctcatgttgaattgtaatctctggtattagagatggggtctggtgggagatgatgggctcatgggggctgagttctcacaaatggtttagtaccaaccccttgttgctgtcctcaccatagtgagtgacttttcataagatttggctgtttaaaactgggtggcactgttactggaaagggatccccatctataccccaagagagggctcttgaatctcctgcaagaaataatttagggtgaggccaggtgcagtggctcatgcctgtaatcccagcactttgggaggctgtggtgggcagactgcttgagcctaggagtttgagaccagcctggccaacatggcaaaaccccatctctactaaaattaaaaaaaaaaaaatttagccaggcatggtggcacatgcctataaccccagctacttgtgatgctgaggtgggaggattgcttaagccctaggaggtggaggttgcaatgaggcgacatggcactcactctgtctccaaaaaaaaaagaaaagaaaaaaaactgggggcacagagcagccccaagggctactagttgccctttttaatggttatttcttgattatatgctaacaagggggtggattattcctgagatttctgggaaaggtgtgggcaactcccagaacttagggtttctccccttttcagaccatacagggcaactacctgacattgtcatggcatttgtaaactgtcatggctctggtcggagtgtagcagtgaggacaaccagaggacactgtcgtcaccatcttagttttggtaggtttgggctggcttctttactgtaatctgttttatcagtaagatctttgtgacctgtatatcatgctgatctcctatctcatcctgtaacttagaatgccttaacctcctgggaatgcagcccaataggtctcagccttattttacccagcccctattcaagatggagttgctctggttcaaatgcctctgacgtatttcccctcttccttttataagagaacccttaatcctaagggttgtacagggataaagatgtatcttctgtaacttcttaaggctgaatagaggcaatgatattcctgactattagggtcttttgcattcagggtagagaggagctcagtcagaaagcataggcatggtgagggccattcataactctgagaaaaggtgatatctggaaaattaataagtgttcaatttaagaaaccattaagtaaacttatcctgcatctctacgcaaagagtacaaccacaatatgttccacaacagcaaagcaaaataagtaaaattatcccaagtaaatgaaataagaaggctttccatgaactgggcaactgttgaaaccaagctgatatggggacattagctgattccaaaatgtgaccagaattagaatattgatccagatttttacattacccatccctcttgtttcttctgaactgcagccagagctcactggttggttcacagaaataagtagggttagtctaaattgcaggaaaaaactaaaaaataactgatgagactagaatctaagaacaagtttttgaaacataatttttctctctctagtctcccatttttattaaaaacaaatcatggcaagaccaatttgctttattatacttggcctgattatttctataaagagcagcaagaataattattgttcacataggcttttaaaataggcttttttttttcttttttttgagacagggtctctcaccattgcccaggctggagagcagtggcatgatcttggctcactgcagcctccacttctaaggttcaaatgattctcctgcctcagcctcctgagtagctgggattataggcacctgccaccacacctggctaatttttgtatttttagtagaagcagggtttcaccatgttggccaggctggtctcaaactcctgacctcaggtgatccacctgccttggcctcccaaaatgtggaattacaggtgtaagccatggcgcctgatctaaaattggctttaatggactctgttccatcaggaatctcagataagagtctttttaaagttaagcacagccatgcatttataccctcaaatacctgtgagttgggtgaattcctctcctcttgaagtcccaagataacttggggaccctgggactgtaagaaagtgatattctttactcaccacaggtcagaaaccctgtacagggactgtgtagacaaggtatgaggccagttttcccaaggggcttttattggctttataagtcaagtttgattccttaaaggaaagtacaccattccagtcaaagccttggtaaaataaccagtatctccaattgtgtcttgttacaaaagaaaacgaattcttattgcacttatgcaggtaactatattgccataaattaagaatactcaacaaatagtttttaaattctggataaatcaggtagagagaaacaaatatgctccaaattgtgttcacaggtattctttactcaattgttaaaagctgtaaacagttctaaagaaaagtctctttaactctgaaaaacaaaacaaaggatcagcaacattttaagcaaaaagtcaaaaaaggttacttcattcttctattagttcagtccacgcagttaacttctgttctacttgatattcatcaacatttcatctctccatgaacactgaaagtttttttcctctgttctaatgtcacagtctccaaagttatcagaaacttgcattcaagaacacctgttagagacctatagctgattacaaaccaccttttaaagaggatcaaaacaagaccatcattgtttgtggatgacaaaatgtcttaggacagccactattaaagccacagttgactaggtaattttggttacttctgtggcataaacaattttacataacaattataactatgaataacatgcactgttatgttagaattgtatactttttgaacacataccaataacatatttatacatatacagcccaaagaaagccaaacagcatctcatagttgacaatgtttcctgcatggttttataccaaatgagccacactttaccattgcattaatgcattattgatgtcaaacccaatccttaataaaaccttatagacaaatctatccaattttaatgtctgaccaaaaggtaagattctcatagatcttttttatagcctttacaatttttgttaaagagcagatcaattctccgagagaaaacctcattgtgcttttatttgaatattcaatttatggaaaaactgaataatattcctttaactttagccaatattttcacacatagaatttcttttacaagaataatttttcacaaaccttccataacttgtccaaacctttagatttatcctaactgaatacaatcctttaacactttaatctaggcagaaaaatccacattcccatgccttcttaaaatcttttgccaaaagtacattttactttacttatacaccttgcaagtaaaattgtttcttcagtagcctcaattacatgttacagtgttaactcttaacttttacttttggtgaaaaacctggttaatgagtgatttatttatttttatttatttttttaagatggagtcttgctctgttgcccaggctggagtgcagtggcatgatcttggctcactgcaacctccacctcccaggttaaagtgaatctcctgcctcagcctctctagtagctgagattacaggcacccaccaccatgcccagctaatttttgtatttttttttttttttagtagagacagggtttcactatgttggccaggctggtctcaaactcctgacctcaagtgatctgcccacctcagcctcccaaagtgctgggattataggtgtgagccactgtgactggccaataagtgattttaattacgtaccaggtgtgtgtggagcctaggacccagagagaagtacagataaggtctgacttttctcagcatagccagggggtatggatagctccacatgtccccaggtttcatctagaatttaatgctccaaagtaggtaaattgaacaattttcaaaagtcaaagaagcagtttatgaccttaaagcattaagcaaacctaatacctgacctgcataatttagaccaaatgcctaaattttgaaaacatttttgttttaccaataatctttaaaactgtgtttcccaaagcttactaaagtcatgtgaaccaaaaggcattaaagtttttatttttctgacaaaatatttgatttaagcacttattatttttaagccaattaatcaaagctctttcatatagaaacattatacacataacacatataaatacaaagacagaagaagatccagtagttgaaagatttttcatttgccagtttcttaattggattactggcttcagggtggagcccttggaggaacacagccaggaaagcatgccatttctacagcctaataagtaggcacagctggaaacaaaacagattcccaaaatttaagggtcccagatccagatcctggatccccaaaagagagattcagcccatctcccatgggagtcttatctctcagtgggggtggggtcatttccataccttctaggtagtcaagagcatgcttctctaatgcaaacatgcaaagagccacgtattcccccataactgccattagctatccccaaaagtatattcctacccagttgttatactaggtaaagcttataccaaagctctctaataatgtaaagtaatttctgataccccaaaaagttaaaaatatcagataatgcaatgcaaaacaggacaaagccttagattttgagaggaatctacccacttttatttcctgggtttccatgaagacaatagacatttttccccaaatgggatctgtggtgcctcctattactgcaacctgttttatcagaaaggtctttatgacctgtgtctcgtgctgacctcctgtctcatcctctgactaagaatgccttaacctcctgggaatgcagcccagaaggtctcagccttatttcatccagtccctattcaagatggagtcgttctggttcaaacacctctcacagcacctcagtctctctcttgctcctgctctggccatgtgaggtgcctgctcccccttcaccttcaccatgactgtaagtttcctgaggcctcccaagaagccgagcagatgccagcaccatgctacctgtataacatgcagaaccatgagccaattaaacctcttttctttacacattacccagtctcaggtatttctttttttttttttttttgagacggagtctcactctgttgcccagggtggagtgcagtggtgcgatctcggctcattgcaagctctgcctccagggtttatgccattctcctgcctcagcctcccgaagtgctgggactacaggcgcccaccaccacgcctggctaattttttgtatttttagtagagatggggtttcaccgtgttagccaggatggtctcgatctcctgacctcgtgatccgcccacctcggcctcccaatcaggtatttctttatagcaatgtgagaatggactaacaaacattacctgagttctgtgagctgttttagcaaatgattaaactcaagaaagggatcatgggaccctctgactcatagcctgtcagaagcaccaggtgacaagctggacttttgattggcaaccgactgtggggtaggtactaacttcagatagatcatgtcagaactgaattgaattgtaggatacccagctggtatctccagagaattggagaattgcttggtataggaacccctgctacacacacacatctggtgtcacaagtgaagtactgagtttttcctttcgttgtgaagaagaaaaccctttttattctaaatgccttgtgtttggtgtcattgaagctacatagtgtcttagttctttccggctgctataacaaaattaccttagactagggcatttataaatgacagaaatttattcctcatagttctggagtctggaaagtgcaaaatcaagatgccagcaggtttggtgtctggtgagggccctttcatgagggttccgctcccattaaccactcctaaaggccctatttctttttttttttaattatttttttgtagagggtctcactattttgactaggctggtctcaagtttctggcttcaagcaattctcccacctcggccgcccaaagtgctgagattacaggcaagaggcacttgtgccagtcccatttctttttctttttcttttttgagatggagtttcactcttgttgcccaggctggagtgcaatggcacgatctcagctcaccacaacctctgcttttggggttcaagtgattcttctgcctcagcctccagaatagctgggattacaagcatgctccaccatgcctggctaattttttgttgagatgggctttctccatgttggtcaggctggtctcaaactcccgacctcaggtgatccacctgcctcagcctcccaaagtgctgggattacaggtgtgagccactgcccctggcccctagccccacttctttagtactatcccataggcaattaggttccaatatatggggagataggacatttctgctgggcttgaacacctacatttttaaaataaaatttaaaaacaaccataataccatcatcactcccctactaccccccaagtgaaaaatatcttagtatcatcaaatatccaaagcccacgtagactacaaatttatttccaccaattcaaattcctgggctggagcatctgattagtgggtctacaggactactctgtatctaccaaggaggagagagaggaaaggtataacctcattgaggccccaatagcttctcatcagaggattctgcctgatgctggcaagacaaaaaaaaaaaaagagttttgccaggcgcggtggctcacatctgtaatctcaacactttggaaggctgaggcaggtggattgcttaagtctaggagttcaagaccagcctgggcaacatagggagaccccatttctacaaaaaatttttaaaattagccaggcatggtggtgagcacctatagtcccagctactcaaggaggctgacgtgggagaatcgcttgagcctgggaggtcaaggtagtgagccacgatcatgccactatactccagcctggacaactaagtgaggctcttcccccgctccaaaaaaaaagaaaaaaaaaaaaagaaatgacttcccattacaagtggtgtcagcaataatgcagaagagagggaatggccagaaaagcttttggacaggaggtcagattaaactgagctctatgagatgggtagagtataggtatctagagatgggtagagtgtaggtacctaaagatgggtaaagtgtaggtaactagagagactagaggataggatattttttattttatttttccttctttgtgatggagtttcactcttgttgccgaggctggagtgccatggcgccatctcggtccactgcaacctctgcctcccgggttcaagcaattcttctgccccagcctccagagtagctgggattacaagcatgtgccaccacaaccagctaatgttatatttttagtagagacagttttcaccatgttggccaggccggtctcaaactcctaacctcaggtgatccacccgtcttggcctcccaaagtgctgggattacaggcatgagccaccacgcccagcaatattttttatttctaataaaataataagtgtaatagtaacaaaatttagaaaataaagaaatgtaggaaaatagttattaaaagtctcattacccaaaaaagtcatttggcttaattcatatccctatattttttatttaacgggcattataagaatttatctatgttactgtgggttctttgtcagtataatttttttttaaagagagaaggtcttgctctgttgtccaagctggagaacagagtgcagtggtatggtcatagctcacagcagccttgaacctctgtgctcaagtgatccttctgcctcagcctcctgcatagctgggactacaggtgccaccaccacaccccgctaatttttcaattttttgtagagacaaagtctcattttgtttcccagactggtgttgaactcctggcctcaagtgaccctcctgccttggcctcctgaagggctgggattacaggcctgagccactgtgtctggccttgtaaatatcattttttaacagatacataatattccattaagaaaatgttctacacttcatctgaccagtcctccatattttgacatttattcaaatttcagtttttcttttctttttttttttttttttcagacagggtctcattctgtcacccagctggagtgcagtggtgccatcttggctcactgcaacctcgacatccctggctcatgtgatcttctcacctcagcttcccaagtagctgggattacaagtgtgcaccaccatgcctggcttattttttaaattttttttgtagagacagggtttcaccatgttgcccagactgatctcaaactcctgggctctagcaatcgcccacctgggcctctcaaagtgtcatttcagtttttctgattataaataactgtgatgaacattattttgcttaaagctttttctggttttagagttatttaattactatggactcccaaaagcaaaattctggtaaaatgttgtataaatattataaagagtgggggtatttctgatactgattttataccaccttatattgttatttagtaatctcaagaggtgtttcaaattctcaaggcaaaattgatagaaattggtaaattttaagaccataggccctagggtgtatagcatagaggcagaatttttaactgcgcacacagcgatccagaaaaaaaaaaaaaaatactacatttcccagcagttaagtgtggccacgtgactacgttctggccaccgggatataaacagaagtgttctggcagcagctggaaaccgtcccctttggtgtaccttttgttccctttcaccctcttttattttgctggctggaatgtgaatgcaaccatttgggatcatggtaggaagatatgctagaatgagccgaggtccccgaggattttgaggactggagccaccattccacctttgtactccttttctctctttacatggaaataaatttttgtcttaagctactgttggtttgggttttctaccacttacagccatgcctaattctgactaaatacaatgtggttttaaaactgggacaggcattgttatactcttcttcataagcccagagtagctgagaaatgttgccatgggaaaaaaacattacaggccgggcacggtggctcatgcctgtaatcccaacactttgggaggccgagctggcagatcacctgaggtcaggagttcgagaccagcctggccaacatggtcaaaccccgtctctattaagaatacaaaaattagctgggtgtgctggcaggtgcctgtaatcccagctactcaggaggagggtgaggcaggagaatcacttgaacctgggaggcggagattgcagtgagccgagaccgtgccactgcactccagcctgggcaacaagagcaaaactccgtctcaaaaaaaaaaaaaaaaaaaaatttcaaatgtactttgagatcaggtcacgaggaggtttgactttttaagtgttcctgattctaacagaaaagaaaacattagtgtcagcagcaggaaatttcaagtaaaactataggattcgtgacgtccaacttctaatttagttgcttcaagtgtaaaggcaaaaaggagttgtggggtagaggggagaaaactggtttgtcttgtttccaaggattactgcccctacttcaagagctattaaaaggtcctcttgagagaactgtaaccaaaaataaagtggcactggcaactctctgggaacacatttaactctgctcgtagaagcatagcctgttttaattggctaaagcccaagccaggccctgttttcatctgaattaggaaaaagcaactgctgagaaaatatttaaaaataactataccaatgtaaaaaagcaaagaaaaaaaaaaaacaaacaaaaccccaaaaccctaaattaaaagaacatgtgttcgaatgtacttggttaaagccagatgcagtggctcgcacctgtaatcccagccctttgggaggccaacatggaggatcgcttgagctcaggagttcaagaccagcctgggcaacatagggagaccctctctctatttattttaattttttttaaacaatgtacttaaagtaaatcaaatctggtgaagacacagatgctttggggctcagatctatatgttaggattgggaatttgtatttttgtttctcaaaagtggtcactgactgggtacaatggctcagacatgtaacctcagcactttgggaggccaaggtgggaggatcatttgagcccaggagttctagaccagcctgggcaatatagtgagatcctatctctacaaataaaaataaaaataaaaataaaaataaaaaaaatgccaggcatggtggtgcatgcttgtagttccagttacttaagagtgtggggtgggagaatcacttgagcccaggaagttgaggctgcagtgagctatgatcatgccactgcactgcaacctgggtgacagagtgagaccctgtctcaaaacaaaagaaaaatgtggtcacttcagggggcagtgaagtaagtgcaatattttgctgtgatgtttacaagcaatcttggtatttgatcttttctgccattagaatttgtcagccaagctgggcacagtggctcatgcctggaatcccagcactttgggaggccaaggtgggaggatcgcttgagccaaggagttatagacaagcctgggcaacacggtgaaaccctgcctctacaaaaaaaaaaacaaaaattagccaagtatggtggtgcatgcctgtagtcctaattacttgggaggctgaggtgggaggaccacgtgagctgtgatggcaccgctgcatctagcctgggtgacagtgagaccctgcctcaaaagaagaaaaaggaatttgtcagctgagagcattagggccagactcaaaaccaagagctgcatccaactgactccctctggaattaaatagcatcatcagtgacataccttagtctggtgtcctctggcatacagaactcaccctagactagattgcccctgtcaatgtccctcttccaacctacatgtgatatgtcctgacaagtttctgcaagatttcttcttttccccaaactgaccccagattaaagcttcaggagcttgctctcaaccaagctgaaaaggggccattcaatttgtgactccatatggcaagatgttcatccaagccagcttccttctgccagcctgcataccttcagactcctccaaacaatcaggggctgttcacctggggacagcaaacaaagttggatgttgtctttggcaaagtataaaaaaggcagcaaatatatttcaaaataaatcttacactgcaccccaaagccaatatgattaaaaagaaacatgtaaccatgtttgccattcttgttttttttttttttttgagacagggtctcactctgtcgcccagggtggagtacagtggcgcaatctcggctcgcttcaacctctgcctcctaagcttacgggatcctcccacctcagcccccaagtagctgggagtacaggcatgaaccaccatttttctgtattttttgtagaaatggggtttcaccatgttgtccaggctggtctcaaactcctgagctcaagcaatctaccagcctcagcctcccaaagtgctaggattacagatgtgagccatcgtgctgcgcctggacagccattcttttttttttttcttgagacaggatcttgctctgtcactcaggctagagtgcagtggcgcagtcatagctcattgcagcctcgacctcctggactcaagtgatcctccaacctcccaagtagctgggatcacaggtgaacactaccacacccagccaattttgaaatttttggtagagacacggtctctctatgttgtccaggctggggctattctgttactataataaacaattaaccttcagtgggtcatataatccctttacttatgggcattaggatgtttctgatgtttctgatgatgtttctgtctttttcaaaatagacatttcacttccagggtactggggttggctgtagtacttggcaatgaaatctacactttctcaggagaaaaaagtcccgcacttcatcaatcatggttgtttctgagatggatttaacgctgtgttccaccagggtcacagctcgttcttaccttgtgctttttctttgaaagccacctggctcctgccacagccccttgaaggttgcctttgttagttgctcactttccctttaagagttgtgagtgtttcggctggtaaagttccaagtgccctctggacaaattggcacaatgtgaggattttccaatttggaagagaaagagcctgttctccagggagggctcttcaaggtaattgctctctgagaggttcttgccactccctttggcaaccttcagagaaaaatccctcttgctgttaggaggaggtagaaacccacagatgggaaaagaggagctcagggcagacttgccgagacctttgaaaccagtgacctttggaaatgcaggaaaagagggaaaggccagtgcaggcaaaggcagtcgcgcttcccttcccaagataggcactatagctccagctgtaatgaccattttcactgtagtccttttactaaagagctttagcaaaggagtagtggccaaggaagccccttgcagggagagaatggcgcttactcagaagaaatactttaacaaaccacctgggctggagggaggcgcccaacggtgtgctggataagaaaagatggtggttaacaagagcaggggtccaagaaaaaccacagagaagagcaagacatggagaatagagaagtcccctctgggtcaccacccctaccctggcaggggatgtgtggagagaaaagccaggtggtggggtgacaagaaatgggtggtaggctgaaaagaagtatggaagaataaaaatgaaattgttttcagtagatccccttccccagctctgccttgaaactttcagtaaatttcacatcattcaccattgttgtgagtgtaggtaagcaacctctttctggggaaactgagagggcactgtggtctgttgatgttgggcggaaagcaagagagaacggggctggacacagacggggttgtagcacttttgtttccctgtgtgttcacatcacaatcctggaaaatggcagaaaggagcaggcagccacagctgggtctgggtggagaaaaggaggctggaggccaagctgagaagcagtcttcactgtgagttgccaggctcagtgtgaatttagcgctgcctggttccaaagctcatggaagaattacctggtcctgaagtttcctcctcctgcccttgaacaggactttagaactgttggggttagggttagtgctgagagctgttggttcctgtttccggtaggagaacagcatgcggcatgaatgcatgggttttggagactccctgggcttgagtcctagctctgccatttactaggtgtgtgaccttggacacattattcagagtctccataccttaatcttatctgcaaaagcaagggaataatagtaccttctctatagggttactaggggaagcaaatgaaattatatacataagagtcttagcacagggcaataaatattaattgtttttatttgctaacaacaacacagaacagtgccatgaacagccccaaagctcagcactgctatccatctttttaatttttctttcaagatagggttttgctctgttgcccaggctggagtgtagagttgcaaacacagctcactgcagtctcaacttcctgggctcaagtgattctcccctctcaacttcccaagtagctgagaacacaggcacgtgctaccacacctggctaattttttatttattttgtttattttttttgagatggagtctcaccatgttgcccaggctggtctcaaactcctgggctcaagcaattttcccacctctgcctcccagtgttgggattacaggtgtgagccactgcacctggcttatctgtctttttgatccacagaaagagtttaggtcctggagtcaaacagacccagctccagtcccagctctaccccttcctggctggatcactgcaggaaaattatttaacttttctgttaaagaggtgaataacactttgctagtgggattgttgagggggtgaactaatacgaaaagcacctggcaaagtcctgtccatctgatttgatcacaagacgatctgggactcccctgccctagtctgctttactatacacatattctcaacagctctcagacctcctaggaaataaatttttttcctacattcagttaagtttggccagaattaaacaaactctgggatttgttccttctgtgttatctgggaagccagttggcctcaccttagcatcttgctacgcaggttggctgaaccctgactgcagctacagtgtcaggtcagcgaaaggagttgctttgagaacttccgggaaacttttattggccaacatggactaaacgaagtcaagctcatttactatgaaccaaatgttaccccctttcctccagctttgaacaggtctcattttagcaactcctccctccttccaagaccttcataaaggcgtctgccattgaatgcctccatttgtaatgttgactcctcccaggatgccaagccccatcatggacgaccctccagaaaacgctggtcaccatcacactcctttctcatccatatggcagatatgagcaacagtggccaggaggagatgcaatgaaagatagtgcagatgaggattcctgcaaattccactaccacagaaaggtctaagcagtggggaagacaataggcatgctgctgcggtaggaatagtaacagctgtgcttattgagtgcttgctaaatgccaggcacttgctctaagtgttttatagctgtttgttcacttaatcatatacctctgagctgggactgttattctacccattttacagatggagaacatgaagcaaagaaggtttaaataactttcccaatatgacacagttacaaggtggcactcatgagatttgaaccatgtagtctgtggctagagcccatgctctctctctttctcttccttccttccttctttctttttttcttttcttcttctgctttttctccttccttcctttccctttctttttttgatagggtctcactctgtcacttagggtggagtgtgcaatggcacaatcatgctcactgcagcctcaacctcctgggctcaagggatcctcccatcttaacctcctgagtagatgggactataagtgcatgccacccggctactttttttttgtagagataaagcctatgttgcctaggcttgtctcaaactctaggttcaagccatctgcccaccctgtcttcccaaagtgctgggattacaggtgtgagccatgcctggcctagagttcatgcccttaaccatgatagtataagcacaaaatgaaaacacatgtgacattaccttaaggactttaaagtgccttgaaaatatagagtatatgttctattgacagtggatagtggcatgatactttttaaatcactgcaattttttttagaaccatttgacccattgcctctgaaaaacctctccttatggatatttcaaaggcatcacaaactcaatactgctaaaaaataaaagcttaactattttttcctaccatgcgctccaatctgttccttttcttttcatctgcagtgtaacaaatgactctattcaggcgcctaagtcacacacctgggaatctccttggatgccccctctcctcacccctgcattagaccaatggccaagtcctgctgattttaccccgttagtctctaagtttgtctgtccccttccctgggctccttccttgattgaagtgtgccctcagatctcccctggatccctctgacacactcagagctcatgactccacctccagcctcccctcccagccatgctctacactgaagctacaggagctttctgaaatgaacccgttcacattgccctccttaaaacccatatgtagctcctagaacttttaggatcacatctaaaccctttccttggctgacaaaggtctttctcacctgcacctgccacctccaggctccatttctgctgacttctgaaggcacagcacttggggaccacaatatttttagggatccacgaacatgttttaatttctttaaaatcagaaagaaaaacaatggacttttaaatcacaaaaggtgttttaatatataatagtaatttatatgtttataccaacacagccataaaatatgtattttaatatatttgtttaacagagggaggggcccatgaaagtaaaatgcctagggccatcaaaagctataaggtagccccattgtttacatttccaaagtcccccctctcctggctaactcttcctcatcagtccagctcttagttcataaatcttgccctgcaggaagtcttttttctttttttgagatagggtctctgtcgcccaggctagagtgcagtgactcagtcatggctcattgcagccttgacctccgaggctcaagcaatcctctcacctcagcctcccaagcagctgggaccacaggcatgcaccaccatacttggctaatttttaaattttatagagacaggatctcactgtattgcccaggctagtcttgaacttctggacacaagcagtcctcccgctttggccttccagaatgctgaaattacaggcatgagccactgcacttgggccctaaaacttttttctaggtcttttctaaccctaaaactaaactaagtatggttctgactgctccagggcaccctgctgttgtctataccacagcacagccagccaagtatggtgtttgtcctgttttctagaaactccttgatagcaggcttaagtctggttcatcgatgtggccctggcatctggcacgtagtaagcactcaacaaataactattgaatgaatactgttctgtctacacagaagtttaaaatagaaaacaaccttcaggagggcacctgttttgaaacccttgaaatgcatgcattcttttcaatttccctcctaaggagaggccacatagcaaacagagaggcagacagcctaggttggaacctcatctttgccaattacacctgcatgaccttgagcaaattattcaatgtcctcatgcctcaatttcctcatctgtaatgtggggataataaaagttcctaagctcataggatactaggaaatttaagttaatagttggaaagcacttgtaacaatcaatgcctgtattagtctgttttcacgctgctgacaaagacatactcgagacgggggattttacaaagaaaaagaggttcaatgaactcacagcgccacgtggttggggaggccccacaatcatggtggacgagaaaggcacgtcccacatggccgcaggcaagagataattgagacccaagcgaaagtggaaaccccttataaaaacatcagatgttgtgagacttactaccgcgagaacagtatggggggaaccgcccccatgattcaattatctcccaccagctttctcccacaacccttaggaattatgggagctacaattcaagatgagatttgggtgggtacagagacaaaccatatcaatgcctaatatgtagtaaactatcttaaggaaatattgaatgaaggatgcagatgctgcttttgttttatggcagagttgtagctccaaatgtcacaatgcatatttttttctgtcaccgaggctggagtgtggtagctagatcatggcttagtgcagcatcaacctcctgggctcaggtgattctcccacctcagcctcccaagtagctgggactacaggtgcacaccaccatgcctggctaatttttgttgcctaggctggtctccacctcctgggctcaagcgatccatctgctttggcctcccaaaatgttgggattacagacatgagccaccgtgaccaactcacaatgagtatttttgatgtattcctctccttctcttgttaattcactgtaccctaaggtttggtttgccttcctccctgcttacagctctgtaaaagcagttgctggactgagacacaggaagggtctggagccttctccctcacaactccaagatgagatgcaccggggcttggggtcaggtgggggaggggagggacaacagcagaagaggaaaatgaggaggaggaatccggagccctcaaggtggattctagagagcggcaccttccatttggaggatggggcagggagtcaaggcagccagcttctcattgtcccattgtctgtaaacagccccccgtaactatcctggggccacaacacttgtaaagccccctagactggatgtgttaggacttagcctgaggggagctctccctcctcataaggtgaaccagtacgtaatcatgtgggaatttctcttggagtcataacagcactggacatagcaccaccatcataattacagggatgttgttaaagtgttatctattacaataaaaaatgaaaacaagtaaatgtctaataatatgggatcagttaagtaaataatggtccttcctccctttctttctccctttctttctctttctttccctccctcccttccttccttccttcctcctttcttctttctttctttctttctctttctttctttcttccttcctttctttctttctttctttctttctttctttctttctttctttctttctttctttctttccttctttcttcttttttttttctttttttttgagacaaggtctctctccatctgccaggctggagtgcagtggtgtgatcttggctcactgcaacctctgcctctcaggctcaggtgatcctcccacctcagcctccccagtagctgggaatacaggtgcccaccaccacacccagctaatttttattttattttatttcatttttatttttggtagagatgggatttcaccatgttgcccaggctggtaatctgtattcttttcttcctttcctttcttttcctttcctttccttttccttccttccttccttccttccttccttccttccttcctttcctttcctttccttccttccttccttcctttctttctttctcttttttcattcaaactagatcagaatgtaaatctgtgttctttcaatgcaatgaactaaactatgagtctagccatttttttgagttctctgagcacttcaaatgagtcattgagccagagggtggtcttagggccctgtgacaccttgtttcttagttttggaaactctcttgatatctctgcctttttttgtctccatccccaccccactgtcacccctccctcttctatgaaagagcaggtacctggacaagctctatcaggagagaaaagtttagatgtatagatgagctaagctgttctgcacaacagaagtgccaggaatctgatctttctttctgataggtcagaaagactctattttcaaggtcctgacacgtgtagcaaagcagagaaggacctggttagaggtgaaagggagaagaccaagatggcagcaggccaagaccttggacgcagaagtacacaagaaatctccattgctggcagcaatggccagcgctgagccttatgtcatctcccacattgtgcttggttgggggtcaccttcttgatcccgaactccagtaaagaagaatctgttatccacttagtacttggtgacctttggggacaaaggaggagatagatggagacaaagtagagggtgcagggacaaagcagagaagagagcagacagcaactttaggaaacggatgtggggattcagctgaaccagggattggaaaattaccagaagaaggcttgatgtccctcagcacgtggcatgggaccaagacattttgtttggctgtcaaagaacaggcgaccacagaaagttgaaggacttgggagcatatatatccctgcatcgagattcattaaaaaggccctggaggaatatatctgaaggctattagtggctatctctaaatgtggggtaacatgattttatgtttttatttaatctatggagtctaatcttttctactatgacaatgtaaggttcttgcagtaaagaaaaataactgttggccaggtgtgatggctcatgcctgtaatctcagcattttgggaggctgaggtgggaggatcatttgagtcaggagttcgagactagcctgggcagcatagtgagacctggtctctgcacaaaattttaaaaggtagccacgtagggtggtgtatgcctgtggtcccagctacttgggaggctaaggtgggagaatcacttgagccgaagagattgaggctgcagtgagccttgttcatgccactgcactccagcccaggcaacagagtgagaccctgtctccaaaaaaaaaaaaaaagaaaaagaaaaagaaaaatatctgttaaaggtaaaagtgatattcttggccatgtggctcatgcctgtaatcctggcactttgaaaggctgaggcaagtgaatcacttgagcccaggagttcaagacaagcctaggcagcatggtgaaacacttctctacaaaaaacacaaaattagtcaggcatggttgcgggcacctgtcgtcccagctattagggatgctgaggcaggatgattgcttgagcctaggaggcagaggttgcagtgacctgtgatggcgccactgcagtccaacctgggcgacgaaaagaacctctgtctcaaaattaaaaaaaaaaaaaagttgtaaaaaagtgatattctggccgggggcggtggtttatgcctataatcccagcactttgggaggccaaggcggacggatcacctgaggtcaggagttggagaacagcctggctaacatagtgaaaccccgtctctactaaaaatacaaaaattagctgggtgtggtggtgggtgcctgtaatcccagctactccggaggctgaggcaggagaatcacttgaacccgggaggcagaggttgcagtgagccaagatcgtggcattgcactccagcctgggcgacagcgtaagactccatctcaaaaaaaaaaaaaaaaaggcgatattcttagctagaaaattcaaaatacacattcagtagtacccccttatccacggtttcagttacctgcggtcaactgtagtccaaaaatattaaactgaaaattccagaaataattcatgttttcagttgcttgccattctgagtggcgtgatgaaatctcacaccgtcttgcttcacccctcccggcctgtgaatcctccggctgttcagtgtatctgaactgtagatgctacttgcccattagtctcttagtagctgttagttatcagaccaatccatggtattgcagtgcttgtgttcaagtaacccttatttgactcaattgttgtgtttattattcgttattgttgttaatcgcttccttagtaagcgcctattttgtaaattaaactcgatcatagatatgtaggtaggaaaaacatagtatataaaaggtttgggcgtcgatcagcgagggagcagcaaatggccggcggttggcgcctcgcggggggcgggcggcgcagagtagggggcggtggccagggccgaggcgtcgcagcagctaggacggttcttctgccactgctgctccctggacaccgtcccgcgcctatcggattatatctgcccaagatgtgcgtctgattttatcgaggagcttcctgaagagaccaggagcacagaaaacagctctgccccttccactgcccccacggaccagagccggccgccgttggagaacgcggaccagcacctgttcacgctgccgcagggctacggacagtttgctttcggcatctttgacgacagcttcgagatccccacgttctctcctggggcgcaggctgacggcagcaaggaccctgagagaccgtgggagacagagcatcagtcccggccccgtactgcgcccggcagccccgcctccgcctccccacgcggcgggccaccggccggcacgaaggcctccccacgctagaagggatcatccagcagctcgtcaacggcatcatcacgcccgccaccatccccagcctgggtccttggggagtcctgcactcaaaccctatggattacgcctgagtggccaacggcctggacgccttcgcacagctcctcaatcagtttgaaaacacgggccccccaccggcagatgaagagaaaatccagtacctccccaccgtccccgtcaccgaggagcacgtaggctccgggctcgagtgccccgtgtgcaaggacgactacgcgctgggcgagcagctgccccgcaaccacctgttccacgatggctgcatagtgcaccggctggagcagcacgacagctgccccgtctgccgaaaaagcctcccgggacacaacacggccacgaacacccccgccccgggcccgactgggatgaactgctcctcctcgtcgtcctccccctcctccagctcgcccagtaaagagaacgccacaagtaactcctgagcccgcgtgggccggcacccaccactgcccgctgcgcctgaggctgcggggaaaccgcggggactttcccaaccaccctcagccagggccgcacggcacccacagactgggtgccccagaggcgccagtcttggctggtcagcgctacaggccccgcctgttccagggcaggatcctggaccggcccaccggctccctggctcgggaaggcgtgggccacatggtcccctctggggcgccttcagcctccccgtcttttgtctaacctcaccctctaaacgttcagcggtggaaagatttttagaattttaaattattactgctttgaaataaatggaagttttagctcacatggcggccatgcatgatctgtggcaagacggggcaccgctgctccaccagtgctgcgagcgccgtcagaataggccgcgtgggctcccagccttcccctcggctgcctccaggacctggagtttgggggctcgggaccatgagaatgaccagcaaaattcaggaacaaaactgctccaacggactttttttttttttttttttttttttttttttgaggaagtctagctctgtcgcccaggctggagtacagtggcacaatctcggcggctcactgcaacttccgcttcccgggttcaagcgattcttctgcctcagcctcctgagtagctgggattacaggcgtgtgccaccacgcctggctaattttttgtgtttttagtagagatggggtttcaccatgttgcccaggctggtctcaaactcctgacctcgtgatccgcccgccttggcctcccaaagtgctgggattacaggcgtgagccaccgcgcccggccaccaacagacttttttaaaggaaaaaatatgtgtgtcttgaaagctatttaaaatacactacctacaaagattaaaaaaaaaaaaggttttgtactatctgtgattttaggcatccactgggggtttaggaacatgtcccccatgggtaagggggaactactggatttactgtatttatgaaatctgtattgtggtcagcactgggattggctctggatgaacacaaggaataagccctctgcactcaaagaaactgcaacaaatggagggaaacctccaaataaaccaataagtgtgtcctgaccaacaggggtgcatgcaaagaaggaaatgacgtgggtactgtggttgcgaataatagaaggaagctttatgtggtggaacctatttcagaggatgcttaataaaggcttccatgtggaggtgatgtttaggttcagatctgaaggagaaaaaggagcctgcagccacagcttgtagaagagagttccagacacagggaatgcctatggccagcgctgaataagacaagacaagacagaaattgactcctggaaggggatgtttggggagtgcaggtcagattgtggagaggggctgggggtagcttgcgcagatagagtatagccgttattccaaatgcatggggaattgtggaaattcatcattgtttgcattttaaaaagagctatctggctgtatcatggagaataaactagaggagagcaagtgaacaggctcttgaaagagaagaagctggggtggtaccagcgaggatggaaaggggtgaggggatttaggccattttgaaggaaaacaaatagataaataagacatgatgttggattggaggtaagggataagagggagctatcactgatggcttcctgttttctggcttggaattatctaccaaggtgacacagactgtaggagaaacaggttttgacctgttaaatttcagatgtctgggtttattaaaagggtggcattcagcagtggctcagccctctgatgtggtaaggttcagtgccaacaagagaaacaatcctccaaattgctttggcattactgaagccacacttatttttaatagctttatacagctttagttccttacttatagaactgttaaggacttaaaagagtagtgaaggccgggcacaggggctcacgcctgttaaatcccagcacttagcactgaggcaagaggatcacttgagcccaagagttcgagaccagcctgggcaacctaacaaggccctgtctctacgaaaataaaaataaaataaaaattagccgggtgtggtgatgtgcacctgtggttccagctacttgggaggctgagatggaagacttgtctgagcccaggagtttgaagccacagtgagctgtgatcatgccactgtactctagcctgggtgctgagtgacagagtgagaccctgtcttgaaacacacacacacacacacacacacacaccagagtaatgtgtaattttcagttgtactttattttgttttatatgtgacaatatgtgctacagtggtctttggtagcttgagttttcataaaggtaaaggatataatcctcacaaatgtcaaagatctactatagatataataggcaatgtatttaatcaattgccagtaacattttatggaaaatgtaaagatactagttgatgtgtagtctgtggatagacaatagttctcctggctgggtgcgatggctcacacctgtaatcccagcactttgggaggccgaggtgggtggatcacttgaggtcaggagttcgagaccagcctggccaacctggtgagacccccatctctactaaaaatacaaaaattagccaggcatggtggcgcatacctgtaatctcagctacttgggaggctgaggcacgagaatcacttgaccccaggaggcggaagttgcagtgagctgagatcacaccactgcactccaggctgggtgacagagtgagactccatctcaaaaaaaaaaaaattatcctttaactatcactagaagctgggaactctgttttacactataagtatcccatttcagctcctacattatttgtcatctattttacatgtaggaaaatcaaggctcagaaaagttaagtaatttgcccagggtcacagagctagcaaggggcagagtctgtatttggactcaggtctgggttggctacaaagtttgagcctttatttgattgtttgtttgttagagacaggctctcactctgttgcccaggttggagtagaggtacgataatggctcactgcagcctagagctcacaggctcaggtgactctcctgcctcagtctcccaatagttaggactatagacatgcaccaccatgcccggctaatttgtgtgtgtgtgtgtgtgtgtgtgtgtgtgtgtgtgtgtcacagagacagggtctcgctatgttgcccaggccggtcttgaactcctgagctcaagcgatcctcctgccttggcctcccaaagtgctgggattacaggtgagcacctctgcacctggctgaaagcttgagtttctgtgtagtagatatttcattacagaatggattctctggaagcagaagctatgatgggaatggaaaatagaaaggtttattggggagcaacacccatggaaggagacctatcaaagtctctaccagccaaacaggaagctctgaagcaaaaactacccactggaggggtccagcattgagcagagatggctaggccgttcttccacccccttgcccagtcattgactagggagaatgtcccaagaagagcatgatctcagctggaaagctgagctggacttgaaggctgtcagtgaactgaaatctttgcagctgggcagtgagcccacccttaaatggggatctgaacagtgcatctccttgtctgccacaggctctaaaaattgtcagcactctttcacccaagaaaaggcactgcattagttatctatcgctgtgtaactaattgccacaaaatgtagtcgtggaaaacaacaaacatttgttatctcacagtttctgtgggtcaggaatccaggcatggcttagctgggtgcctctggctgacggtctttcataacgtggcagtcaagctgtcagcctggaccgcagccccctccaaagactcaactggatggagaatccactcccaagctcacatttgttgttgtctacaggactcagtcgcctcatcacatgagcctccccacagggctgcctcatgacatggcagctggcttcctctagggtgagcaatccaagagacctcagtgagaaagaggacccaaaataaaagccatggtcttttataattttggaagtgacattccatcccttctgctgcattctatttcttaggagtgagtgaatatatccagtgtacagtcgaggaatgtacaaatacaagaataccaggaggtgggactccctggcggccatctgagaggctgcctcccatattcaaataaataacactgtggcaataataagattggctcccatgtattgagcagttgctataaatcaggggtggtattaggcccttacatacatgatctcaccatgtctcctgtgttcactcaggattcattaggcaccaggcactgcaagttctagagaacagaatggcaaatgaggaacactcctgctcttgaggtgctcatgtctacaggaataatttgttctgattttacaaaggaggacaagaaaggtcacacactaagtggctgagctaggaggcccaagctgctcaatgtgactttgaggccagaaatgtttgtgaagacagcatactcctgaatccaccatcccggaaaacatcagcaggcaccaaaaaggcctcttcacacattgtctaagaacaattgtgaggaagaaacaagtcacaaagaatatatacaatatcattcctttttctttttctttttttttttttttttttttttgagacagggtcttcctctgttgcccaggctggcatgcagtggcgtgatttcggctcactgcaacctccacagtgttcaagcaattctcctgcctcaacctcccgagtggctgagattacaggtgcctgccaccatgcccagctaatttttttgtattttcagtagcggcagggttttaccacattggccaggctggtctcgaactcctgacctcaggtgatccacctgccttggcctcccaaagtgctattacagacatgaacctccacacccggtctaattccatttatatgatattcacaaactgatgcttgtttatggggcacatttagttgtaacactaaagaggaaagaaagaaaacggtttccacaagttaggatagtggctacttctgggggagggaaggagatggaatagggggacacacaggggctgctgggagggggctgaatactattctagacctggtggtggttatatgggtgttcaatttataatgacaattgaatgacacatatatgttttctttactcctctgcatgtatgacgtagctcacaaataaaatagcaacaagaactattgtgttgagtgggaagcgatttgcagggtacttgcctatgcctgtgatggaaggcaaagagctctccttttcagagacaccggggatacgatgtcttcgtgcctctggcaaatctctcacacagatggctcgaagcctggtttaccactatgtccttaatgtgtgttgcacccaaaataaattctgaggaggacagtgcttggtgagatcatcttgccatttgatacacgtgtctgagcaagttggtgttttttctattcctgagcccactgcctaagagtgaaacctgattcacattgtaacaatagccactcagatcttcacaaagcaaagagaagctttatacaaaagggtgaaggaaagctcactcctaggatacctctgattcattaggctttaatggattccattcaagaacctgtcagaaaagccaggtgcagtggctcacacctgtaatcccagctgctttgaaggttaaggcagaaggatcccttgagcccaggagttcgaggctgcagtgagctatgattgtgccactgtgctctagcctgggggacaaaatgagaccacatctctaaaaaacaaggaggaaggagaattttattacttaatggatatagagtttctgttttacaagatgaaaagggttctagagctgaatactggtgatggtaccagaacattatgaatgtatttaatatcactaaagtgtacacttaaaaatggttacagtgggctgggcatagtggctcgtgcctgtaataccagcattttgggaggccgaggtgggtagatcacctgaggttaggagtctgagaccagcctggccaagatggccaatgtctctactaaaaatacaaaaattagctgggtgtggtggtgcgtgcctgtaatcctagctactctggaggctaaggcatgagaatcgcttgaacctgggaggtggaggttgcagtgagtcgagatcacgccattgaactccagcctgggtgacagaacaagactccaccaaaaaaaaaaaaaaaaggttacagtcgtaaattttatgttgtgtgtattttaccgcaataaaaaaatgggggagggggggatatgtggcatcaagccaggaaaaaacatggaggtttgtaaccagcctgggaaaaacagtgagacccccatctcaaaaatcgaaaaacaagacaaaacaaggccaggcgcggtggctcatgcctgtaatcccagcactttgggaggccgaggcaggcagatcacgaggtcaggagtttgagaccagcttggccaagatggtgaaaccccgtctctactaaaaattttaaaaaaaaattagccaggtgtggtggcgggcgcctgtagtcccagctactcgggaggctgaggcaggaaaattgttgaacccgggaggtggaacttgcagtgagctgagatcatgccactgcactccagcctgggcgacagagtgagactccatctcaaaaaaaaaggaaaaaaaagaaaaacaagacaaaacaaaaaagacataaagacatggaggaaacttaaattcatattgctaaatataagaagccaatctgaaagtaatacatattgtgtgactctataactatatataatatattatatatttatatataaaatatataatatatatattttatatataaatatattttatatatatatatatatatatatatatatatatatttttttttttttttttttgagacagagtctggctctgtggcccaggctggagtgcagtggcatgatcttggctcaatgcaacctctgtctcctgggtttgagtgattctcatgcctcggcctcccgagtagctaatccctggcaaccagtgatctttttactgtctctgtagttttatattttccagatcattgtcagggtgcgtggctcatgcctgtaatcccagcactttgggaggctgaggtgggtggatcacctgaggtcagaagttcaagatcagcctgaccaacattggagaaaccccgtctctattaaaaatacaaaaattacccaggcatggtggcgcatgcctgtaatcccagctacttgggaggctgaggcaggagagttgcttgaacccaggaggtggaggctgcagtgagccgagattgcgccactgcactctagcctgggtaacagaggggactctgtctcacacgaaaacaaacaaacatgcaaaaaaacacaatcatattcctctgcaaatgtgtcctccaacttttgtcttggctcagcccagcagcatttttgcatataactgtcctgaattcaccttctttgttatctggttctgcaggcgggtgactcagttacaaaaggtgaggtttgcagggaggtcctaagggaatttgatgacagtgaaggggaactctgaaatactgatccagccacacttacaaacactgctgctatggctgggagttacctctatagagcttgaatcctgtgctgttagaagccttcttctgcaggagtggccttggttttattgcttcttagcggttgggaaccagcttcctgccaactgtttggaaggacatgcccagtttccagctctggctagatatgaaagtgaaagtttctgaaaatgatctttgctggctgggatctgaagcacctgtcaggaggaagaacagattggccctaactcgagggtgctcccaagtggctgtggatcagctatgagtcccttgcagggagaggcaagaagtgtgagcaaagctacaggtaaatgaagaaacgggagacgtctgagacatagcatccattttatttttccttttagtcttttgggcttgcagcagtcaatatttttaattaaaaaagttaatttacgaataaaaattgtatatatttaatatgtacatgatttgatatacatatacattatataatgatcatcacaatcaaattaacatacctgtcatcatccatagttaccactgtctgtgtgtggtgggctaaggtcatttaaattctgttccctcatcaaatttcaagtaattgatacagtaatgtacactatgttgtaaattagatccccagaacttgttcatattataaatgaaagtttgtaccctttcatcaacatctcttcacttccttcacaccccagcctctggtaaccaccattttactctgcttctatgagttcaactttttaatttttaaatttttatttattctatttatctatttattgagacaggggcttgctctgtcacccaggctgcagtgcactggtggtaccacagctcactgcagccttgaactcccaagctcaagtggtcctctgacctcaatcccccaagtagctgggactataggcacatgccaccacacctggctaatttttgtattttttatagaaatggggttttgccatgttgcccaggctgatctcgaacttctgagcttaagcaatccacctcaacctcccaaagtgctggcattgcaggtgggagccaccacgccaagccaagttcaacttttttagattccacaaacaagtggaatcatagagtaattgtctttctgtgcctggtttatttcacttagcgtaatatcttcctggctcatccatgtcccaaatggcagaaagtcctttttaaaggctgaataatgttccgctatgtatgtatatataccgcattttctttatccattgatctgttgatgaacatgggttgtttccacatcttagctattgtgaataaggctgcaatgaacatgggggtgcagatatctcttttagatactgatttcatttactttggatatacagttgaccctccatatctgtagtttccaaatccatggattcaaccaacaaaggatcaaacatattttaaaatattgcatctctactgaacatgaacagactttttttgattgttgttttttaaacaatagagtataacaactatttaggccatgagcagtggcttatgcctgtaatcccaggactttggggccaggcacaggggctcacgcctataatactagcactttgggaggctgaggcaggtggaacacctgaagttaggagttcgagaacagcttgaccaacatggagaaaccctgtctctactaaaaatgcaaaattagcaggcgtggtggtgcatgcctgtaatcccagctactcgggaggatgaggcaggagaatcacttgaacccgtgaggtggaggttgcggtgagccgagatcacaccattgcactccggcctgggcaacaagagtgaaactccatctcaaaacaaacaaacgaacaaacaacaaacaaacagtgtattacaactatttaggccatgggcagtggcatatgcctgtaatcccagcactttgggaggccaagatgggaggatcacttgagcccaggagttcaaaaccaacccgggcaacatagggacaccctgtttctacaaaaagtagaaaatttacccggacacggtggctcatgcctgtaatctcagcactttgagaaactgaggcaggaggatcacttgacgtcaggagtttgagaccagcctggccaacatggcgaaacccccatctctactaaaaaatacaaaaaaaaaaaaaaattagccaggcatggtggcacgtgcctgtagtcccagctacttgggaggctgaggcagaagtatcgcttgaacctgggaggcggaggttgcagtgagccaagatcatgccactgcattccagcctgggtggaccatagcctgggtgacagagtgagacttcctttcaaagaaaaaaaaaaagtagaaaatgtaggctggcacagtggtgcacacctgtagtctcagttactcaggaggatgaggcaggaggacgcattgagcctaggaggtggaagctgcagtgagctgtgttgtgccactgcactctagcctgagtgacaaaaatgatttacatagcatttacattgtgccgagtattataagtaatctagagatgatttaaagtatataggagaatgtgcacaggtcatatgcaaatactacaacttttttttttgagacagcgtctcactccattacccaagctggagtacactgacaccatcatggctcactgcaggcttgatctcctgggctgaagcaatcctcacacctgagcctcctaagtagctgggactacaggtgcatgctaccaatcccagctaaaatactacaacattttatatcagggacttgagcatctgtggattttggtatcaatgtgaggtcccagagctaatccccactgataccaagggatgactgtataccgagaagtaagattgctggattatataggagttctattttgtgatacagactccttgactgtaacttgcactggtgggccagaaatgccagaattacagggtaagctgaagcttagagcaataaagcactaataaggcactaataaatgatagctaatatttattcagcactcactctgtaccaggcattgggctaagtgtttatgtgaaatatctcattcaatcttcacaacaatcgtaaaaagcaggtattatttttgtccccattctagagacaagaaaatggaggcacagacaaattaactaactggctcaggtcacaaaactagtatgtgatagagctgggatttgagtctggcttgctggactctagagtctgtcctcttaaacactatgctagtgaggagcaaggcaaaaagattataaaaagaaagtgcttctcaaatggctataatggtttttagccattactgcttaatgagaagtatagacaggtctattgatgaagaaagaaaaagaacctaaaattggaggtgaagtggtcatcaaagaacaaaaggtcaacaaattgagtttcaaaaatctgattagcttttattagcaattcatgaaccacgcagcatccaatctacaaaacagaaaggagcgccaatgagctagacagaatgggtaagttttataggcagaaagagacagaggaaagcaggaacaatgaacaaatggtggattaatcatttcaagattactttccttgtaagaatgtaagtgaaatcttactggcttaataggatttggttatcatctctctcctgatttcttgaagatctgatcttacaagtaagcaactttggtttggtttgatgacatggaacttcagccttgtttggggcctgccgttttttttcttttcataccagataggtaatgttcaagaccagcctgaccaacatggagaaaccctgtctctattaaaaatacaaaattaggccgagtatggtggctcatgcctgtaatcccagcattttgggaggccgaggcgggcggatcacaagctcaggagttcaagaccagcctggccaacatggtgaaaccccatctctaataaaatacaaaaattagctgagcatggtggtgagcgcctgtaatcccagctacttgggaggctgaggcaggagaatcgcttgaatccgggaggtggaggctgcagtgagcggagattgtgccattgtactccagcctgggcaatagagtgagactccatctcaaaaaaaaaaaaaaaaaaaattacctgggtgtggtggcgcatgcctataatcccagctacccgggaggctgaggcaggagaatcgcctgaacccaggaggtggaggttacagtgagccgagattgtgccactgcacttcagcctgggcaacaagagcaagactccgtctcaaagaaagaaaaaaaaacggaaaaagggatgaagaagggtaagtggcaggtcatgcatgcactgactcctcacatattggctctcatgtcctttgtcaaagcaagtctcatgaccatacctcacttcaaagagagcgtggaagtacatgcctactgcatgtttggaaaaggaaagagaatatttgtgatgaaaaaaaaaatcaagcatgatgatatttgtgtcaatgacagctcaatgtttatagaaaacagtggacattttctaggttttatagaaattatgtgatgcaagaatgtttatcatgtaatacagattttaaaaaatgcattaaatgaccaggcataatgactcatgcctgtaatcttagcacttgggtaggctaaggtgagaggatcatttgagcccaggagtttgagactaacctggacaatatagtgagacttcatctctgtaaaaataaaaataaaaataattatatattttaaaatgcactaaatgatcgccacgtagaatggagaactcaaaatgaggttactactttaattggttttaaagtgacagaagaaatcatagacaacatatttagaagtaactcttactcagtttaaatagattatattatggacaaaaatcatggacaacatgtatcatgtagtatacatattgatgaacaaccagaagggagaaaaaacaaagatattgaaatcaattaatatttcattggttgtacatctgcagtaatcattacattcagttatctttgctatttcccctactttcagtcatgtaaaaaccacagttctatgaagttttaaaatttcattgtcattaaagtatttgttttgttgttataaagctatatttgttaaagtagggagttagaccatatttatttatttattattattattattattattattattttgagatgaagtctcactctgtcacccaggctgcagtgcagtggtgcgatcttggctcactgcaacctctgcctcccgggttcaagtgattctcccacctcagcctcctgaatagctgggattgcaggcacatgccaccatgattggctaatttttgtatttttagtaaagatggagtttcaccatgttggccaggctgatctcaaactcctgacctcagatgatccaccctttcatagttgatgggaaataaatgtgaagctgctgaaggccatttttgttatgacctggggagacatccactgagaacaaagcccagacaaaggacagattgatgagtgatgacatatttgagtacctggatccaactgtgtctgaagccaacaacccctagatttaggtgagccagtaaataaattcccttttctgcttaggccagttctaatttaattttttccatttgcaactgaaagagacctatagtattcactgggctcatcacaaatatttaaaaatgtttaaatattccatgctttttgtccataatataatctatttaagctgagtaagagttacttctaaatatgttgtctatgatttcttctctcactttaaaaccaattaaagtggtaatctcattttgagttctccattctacatggcgatcatttagtgcattttaaaatatataattatttttatttttatttttacagagatggagtctcactatattgcccaggttagtctcaaactcctgggctcaaatgatcctctcaccttagcctacccaagtgctaagattacaggcatgagtcattgtgcctggtcatttaatgcattttttaaaacctgtattacatgataaacatttttgcatcacataatttctataaaacctagaaaatgtccacttttttctataaacattgagctgtcattgacacaaatatcattatgcttgatttttttttttttttttttgagacggagtctcactctgtcgcccaggctggagtgcagtggtgtgatctcggctcgctgcaacctctgcctcctgggttcaagcgattctcctgcctcagcctcccaagtagctgggaatacaggcgtccgccaccacagctggctaattctggtatttttagtagagatggggtttcaccatgttgtacaggctggtctcgaactcctgacctcaagtgatctgcctgcctcggcctcccaaagtgctgggattacaggtgtgagccaccgcgcccggcctatgcttgatcttttcaatgcttttttgtaaaattgcctttatttatttattgagagagggtatttctctgtagcccagaatttgttgtaaaactctgtcacagtagtaacaaaatactttgtacttaggctataaaaaaatatataaaaaaagtaacaccgatttctgcaatttctttctccatctaaaataatttttacataaaattaaataattatctgccatgttcgtgcagtgggaagttgtaatgattaatttgtgggtttttctttttttttctctctctctgccacccaggctggagtgcagtggtatgatcttggctcactgcaacctctgcctcttggattcaagtgattctcctacctcagcctcccgagtagctggtacaacaggcacctgccaccacatccagctatgtttttgtatttttagtagagatggggtttcaccacgttggccaggctggtcccgaactcctgacctcaggagatccacccacctcggcctcccaaagtgctgggactacaggtgtgagccaccgcaactggctcattaatttgaattgaattgcattttgctagaaacatctttatgctattagaaggatgtgatcaccattttttaggatcaccatccaaaaagcataataaagccccagaggtttttgattttcacattcaattgcagcttttataaatgcagttttcttcacatactaatggacatgctggagttgttgcatttgggtttttgagttataaatttgttacaaataattcttttcttgttcttgttttgatcaataattcagtcttcacttagggaagaatgtcaagttgtacggatttcaacggatcttttcaaattatgggtttgaagatattttttgttcattttcatacgattagtaattaaatctttattaaataaggaatttgtgaaagtcttgtctgcaaattttatgtgagtcatgctcagcagacgtcgattcactttcattgttgccagtttttagaaatttaagcagactggaccgggcacggtggctcacgcctgtaatccctgcactttgggaggccgaggcgggcagatcacgaggtcaggagatcgagaccatcctggctaacacggtgaaaccccgtctctactaaaaaaatgcaaaaaattagccgggcgtggttgcaggcgcctgtagtcctgtgaacccgggaggcggagcttgcagtgagccaagatcgcacgactgcactccggcctgggtgacagagtgagactccttctcaaaaaaaaaaaaaagaaagaaatttaagcagactgctttctattttctcttctttcaggctttttgttctctaagttccacttctgtattttctttttctttctttctttctttctttctttctttctttcttctttctttctttctttctttctttctttcttttctctctttctttctttctttctttctttctttcctttctttttctttcttttctctttctttctctctctctttctgcctctctttctttctctctctctctctttctctctctctctttctctctctctctctttcttttgtgacaccgtttcactcgttgccgaggctggagtgcagtgcagtggtgaaatctcggctcactgcaacctccacctcccgggttcaagcacatttcctgcctcagcctcctgagtagctgggactacaggcgtgtgccaccatgcccggctaattttttttttgtattattagtagagacggggtttcaccatgttgtccaggctggtctcgaactcctgacctcaagttatctgcctgccctcagcctcccaaagtgctgggattacaggtgtgagccaccgtgcccagcccatttctgtattttctatctcaatgtgatcttgacttatacttatttaagttatttatttatacttactaaattatacttattcaaattatttaaagaatttttaaattattttatgtaaaaatatttaaataaggctgaatttgtatttaaatttctggaaatactaatgtttttataaaaattcataactctagcattcagtgtcaatctggttatcattgtatttgtccatgtagttgtcaattcatattgtttgatgaatgttgtctctacacctgagtatatacaaatataagaataataagaattatttgatgttacaaaatattcagctgtcacttgcaactgttgcaaataccagaatcatgcatcactaacaaatggtaccttgttatgcaagaatctattgcacttgtgctgagaagatttgacaagttcattagtctttttttattaatgtctcctcctccctgagatctaaagcagtgtctagctctatgttagcagcggcacaacttacaaatctccacggcattctgattaatttcctttttttgtttcaaggacataggactagggtgtaaagaaggaatttcttgggccctgaaacagcgtaagtcatgagaacagatgggtggggtatattggttgtatcatgccagcactaaggggcaaatatcaagttgcagacacccatacattctttagtatacaaatgtgttgtgtttgttatatgtgtggtcctccaaagctcaagttccccgcttgcctgggttaagggcagtggtcactttggatgtcgtcttaggaactagtcaaagatctctggagagtgggatcttcggcagactagaatagggaaaggagccacgctaggtgagatttgagagacagggcagaggcagatttaccatgaggcaaatgaagcttaagttttgaggtccctcatttgtacagattgcgccaaggttttagtgcttgctgattttgtgttctttttcttgaagatgctcccagctcacaaaagtgaagtttgaaaaacttaaggcaggatatcagagcccaaaccagacaggttcagggtagttcagggcagggttctcttctggcagtgtcctggaatacttgacaggaaccaaaggcatatgagctgggagcagaaggtctgggacaatccagtagggttttagagtgacttctgcaactgcagcagtgaggtggggcatggtggctcacacctgtaatcccagcacttttggaagccaaggtaggtggatgccttgagtccagttttgtcatgggcaacatgaaaagtcctatctctacaaaaattacaaaaattagccgggtgtggtggcgcatgcttgtagtcccaactactcaggaggctgaggtgggaggatcacttgaacccgggagggagaggttgcagggagccgggatcatgctaatgcactccagcctgggcgacagagtaagactgtctcaaaaaagaaaaaaaaaaaaaaaagaaagaaagaaagaaaaaagaaactgcagtagtgagattcatctagagcagccctgatcaatagaaatacaatgaaagttacatgtatgcttctgaattttctagtggtcacatttaaataagtaaaaacaaacagatgaaagtaattttaatattttattaaaccccttgtatctaacatgttaactgagtccttaaaatctgttttgttgtgttgttttgtttgagatggagtcttgctctgtcgcccaggctggagtgtagtggtgcgatcctggctccctgcaacctctgcctcccgggttcaagtgattctcctgctttgacctcctgagtagctggaattacaggcacccgccaccatgcccagctaatttttgtattttagtagagatggggtttcagcatgttgcccaggctggtctcaaactcctgacctcaaacgatccacctgcctcggcctcccaaagtgctgggattacaggcatgagccaccacgccaggcctggtgtgtattttatacttacagcacatttcaattcatattaaccccatttcaaccgctcaatagctacatgtggcaagcggctaccatattgggcagcatggctctgcctctatcttcccatcagcgctagctgggaagctgtagtagtttcctattgctgctggaatgaatcaccctgaacttagtgccataaaatggcacacatttattctcttacagctttggagatagaaatcgaaaatgtgtctcacagggctaaaatcaagatggtggtcaggctatctttctcctggagactctgttcctcgcctttttcagctttcagaggctgcccatattccttggctcatggctctgcactgcttggacttctgcttccatattcacatctccttctctgactctgaccctcctataaggacctttgtgttaacagtgggcccatacagataatccaggataatcgccccacatctcaagatctccacctcaatgacacctttatggtgtaaggtagcatattcacaggttctgaggattaagatatttggggagccatgatttggcctacaataggtgcttaataggaggggctacggttacagaggaagagtgctcaggcctgtagccaaaatagggctagggacaaaggaatgactccattttgtccagagtaagagcaaagaacaagctgaaattccacaggaggaaaactaggggaagctgagggtgttgagtcttacttaggaggacctatggtttgattatttgtctcctccaaaactcatgttgaaatctaattcctaatgtggcagtgttgagaggtggcacatttaagaggtaactgggtaatgagggcagaaccctcatgaatggattagctcattcgtggattaaagggttaatgggttcatggattaatgagatatcatgggaatgagactggtggctttataagaagagaaagagacttttgctagcacacttagccccttgccctgtgatgccctgagttgcctccagggagaccccaccagcaagaagaccctcagcaaatgcaagctctcgacctgggatttctcagcttccataattataagaaatacatttcttcttcttctttttcttcttctttttttttttttttttttggcaacagagtcttgctctgtcgcccaggctggagtgcaatggcacggtttgggctcactgcaacctccaccttctgggttcaagtgattctcctgcctcagcctcccgggtagctgggattacaggcatccgccatcatgtccagctaatttttgtatttttagtagagacggggtttcaccatgttggccaggctggtctcgaactgctgaccttgtgattcacccgccttggcctcccaaagtgctgggattacaggtgtgaaccaccatgcctggcaatttcttttatttataaattacccagtttcaggtgttctgttataaagaactgaaaatgaactaagacgagagaaaacctggccaaggcccatcccaactaaccagcagtctccctattctactccctactctatttatttatttattaccttttaggaaacttgtcacagttacaagtcctagaacagagcttttcctccaaagattttatacacacacacacacatgcacacacacacacagacacacacacacacatattttttgagacagagtctagctctttcacccaggctggagtgcaatggcgtgatcttggctcactgcaacctccacctcccaggttcaagctgttctcctgtctcagcctctcgagtagctgggattacagatgtgcgccaccacacccagctaacttttgtatttttagtagagacagagtttcaccatgttggccaggctggtctcaaattcctggtctcaagtgacggctttggcctcccaaagtgctgggattacaggtgtgagccacctgccttgcccaaagatcacacttatttcacgaagtttcatgctcaagccctccccactatcctgtgccacacatgcccataacctcagtgccaagtcagaggctgaacgctcattatgtgcttagtgtagagtggattgtttaaacattaaaatattcatggaatgaaaaaaataggtacattgcattttaccataggaaaactagtaaaacgggaccacgtactcctgaccaaggactcagaactgaataagtcaaaaatacatcctaaaagattataaaaatctgtaatcacctaaaacaataaacacgtgccactccagcttctataaaatgggtttgaggtactctacacagtgattacacagggagtccaatgaactgtagagcacatagaagtaccactggatcatacgcttgaactcaagcctaatttgatggctatcatgtggtcaattataatcttgctggattagttagaccttagcatggctcatatgagatggtttgatgatccaaacatacctcaaagattttctcttgatctgtttccctggagagcaagcagaggtatttgaaacaatttccatgagtcagtaccttcagtgctaaatgtgctattggtaatgacagtccttctagccaactgggtctagtattgaggaaacaagatgcactgggaggtgtggacacctggcacgtgacacgcccactggggtggggcatgtcctgggagggaagcccatgagtgtgggtgccgggaggccatccagtatggcaggcagaacttggaacttggggtgcaaggaagctgataataaacagttttatagtaaaatgggaggcctcagagtcatctcgtataacaagaggtggacagagtgtagcaacagatcagatgtttaattaacacccttggcattcttggataccacagtcaccattcaaaatactgtggggtgatcccagagatccatgatatgtagtcatttgccattttgccaggacaaggatcttaaacacctgaggacctaagaacgacttaagtgaatggctggcattccatctcaccataactttgtgtttctttgttcatggttgggtatgcagaaattttccttcggtaattaaaaaaataaaaatgaccacagtggtttttctttggaaaaaagtcagctgcttcttactggtattaaactgaagagaaattcagccagaaaatgaaatataactgaatgtgaaactcagctgtgcttggctagaaggggttgaccaggcccacttgcacttgtctgtctgtctgtctctctctctctctgtgtctccctctgtcacccaggctggaatgcaatggtgtgatcactacagcctctaactcctgcccatcccaaagtgctggattacttgaatgagccactgcccctggcccccacttatactctaattaaaaaaaaaaaagacattgaagaagctatttgaatatgaccccaaaaagggtcatcaaaggagagttaaactttagtgaaagttgaaaaggaggttaacatgagacgtgaggctatccacaagcagcagcaagcctttgattctggagaaaaaggggcatctgcataaacaacacagagattcaaaaaggcttggaaaagtgttgctcaagcatgttatgggttggctgtaatcagaaatcaagcttgtgggagctgttgttgggaaagcatgtcagcaggtaagcagcaacattgcccccccccccacccccgcaccgctggatgggtggagcatggggagggacttagtcccggaaggcctggagggagtgctcagcagatcatcatcacaccactgcactatgcactgcagcctgggtgcagatcctgtgtcttaaaaaaaaaaaaaaaaaaaaaaaaaagttggggttgggggaggacttttggccccgggaatgaggcagaagctagccaacagaacctaagacaggggccagaagtccaagcagaccccagagcaaacttactttgtgttgtattccccagtaccaagccaaacatcctactctttctttctaaaatcaggatcgctcctaaaaattgtggcagggctgagcctccaggttcaaaggaggttcaagagctctgagatatagagaagagggctggaaaggctaggaaccagaaagggtgtgagaaaattttcccaatgagaagagcaggggcagactgctgcagggctcctggataagtcaaatgatgtaacaactggttctccttctttgctggggaacctttacataaagtcctcaatttgtggctgcctggcttaaggctagggcaatttgtactgtgtaaacttgaataagttgggatctacatttcccagaatcccattccccatatggtttcaagagtgagttcgccaaaagaggaatttgcaggatattagagaggtgaagcagcagctattaccctctgtaggctgtcgtgattagaagtggttacagacaaatgcagaggtgcctatgaccactggcacctctggttccaggtgtagggcccgttttttttttcttgctgtcttctgctcccaatctacctcttcttaccaactgctgatgttatggaacaatggtgtttttgtttgttttgttttgttttgtttgagacagagtctggctctgtcctccagactggaatgcaatggcgtgaccttggctcactgaaacctccgcctcccgggttcaagcaattattgtgcctcagcctcccaagtagctgggactacaggcgcatgccaccacgtccaggtaatctttgtatttttagtggagacttgatttcgtcatgctggccagccagcctggtctcaaactcctggcctcaagtgatccaactgccttggcctcccaaagtgctgggattacaggtgtgagccattgcacccagcccaatggtgactcttgactcaccaccatatacttgacagtgatgcacaaaggcagtagctatgcaaagggacggcttcccactgacctcccatgagcttgttttgccatcctattttggggctagatgtgcttagcttctcagattgatcaaatagtaatctcttctctgatccactacttttctcctggaccttcactttcttggctccccttacaaatgtgtaagatctcatcctagaatacatttcctatcctgtaagtagtagttctgcttccctggataacctctgactatatactaggtagactgaaaaatccaggcaggtgcttacttactcttaaggattatttggttccaagaaacagaaagccacgctgaactaatttaagcaaaaaaggaggcctttattggctgatgttctcaaaccatgaaagtgctggagtgactagagccaggaatttaaaaactgtcagtctcttatctctgctgctcttttcctgttagctttattcttccctccatggagaaaggctgatcaagcccagcttgggtcatgtgtccactatgtggactaatcacaggctagaggaatgaggcattataattgatctacctgggtcacttgcccacctccatgatttggaattgagcctattattagaaaaaagtgtagcatgaatgtggctgctgggagaactgtaagccaggaaactacctccagttacatctactacactacatttagtaaaattaaactgggcaattttgagcataaccaaagccctttctagctaatgcatttaaagacatatctagcagttggaggacacaaataagttgcataggcccttcatagaatctgatattacaggccgggcattgtggctcacacctgcaatcccagcactttgggaggctgaggtgggtggatcatctgaggtcaggagttcgagaccagcctgaccaacatggtgaagcccccatctctactactaatacaaaaattagccaggtgtggtggtgcatgcctgtaattgcagctactcgggaggctgaggcaggagaatcacttgaaccagggaggcggaggttgcagtgagccgagattgtaccactgcacttgtctgggcaacaagggcgaaactctgtctcaaaaaaaaaaaaaaaaaagaatctgacattacactaaaatgcgttgagagttttttttttttgagatggagtcgtgctctgtcccccagactggagtgcagtggtgcaatctcagctcactgcaagctccgcctcccaggttcacgccattctcctgcttcagcctcctgagtagctgggactacaggcgcccgccaccacgcccggctaattttttgaatttttagtagaaacagggtttcaccgtgttagccaggatggtctcaatcccctgacctcgtgatccgcccgccttggcctcccaaagtgctgggattacaggcatgagccaccgtgcccagcttgagagctttttgtactttactggaaaccttacaaacatcaggttattgaggatctttagatggagctccaaaatgtgtctcactagaggcttgctaagatgggcagaagacattctgacagtgaaagaagggtgagaagaacaatatacgtttttttgtttttttttttagatggagtcttgctcaggctggagtgtagaggcacaatctttgttcacagaaacctctgctgcccaggttcaagtgattctcctgcctcagactcccaagtagctgggattataggcatgaaccactacatccagctatttttttttattattattttttattttttagtagagataaggtttcgccttattggccaggctggtcttgaactcctggcctcatatgatctgccagccttggtctcccaaagtgctgagattacaggtgtgagccactgtgcgcagccaagagcgatataagtcttaattaggaagcaaaggaagtgaaagatggagaagattacatctttactacattgagtctctcttatccataaacatatttaataatgtctccatttgtttaagaattattttatgtctttaaataaaggctataagttttctccatgaatgttttggccatattttaatagacttattcttagatacttcatagattttggtactattataaatggtattttaaaaattattctaattgtttgctattaatatacaagaaagtatttccccctccggtgccctgggcattttatatccagaaactttagtgaactttctcattagttctaagaatttatctggagaggctcttgaattttctctatattgtctcctaatttttcacattaaagttaatttttgcaaaaaatccaaattaagtaatgtaagcctaggactgtaatatcctatattaatgttttatgccttaacaactaacaaaatttatttagctcttactggaaatcatattggtctgtggaagtgctttgcaaagtgtgttccatcagccaggagaaagttttcatacttcacactacattctttctttggagattcacaaaggccctgagaagtcctgcaaagaatcttctcaaaactgggtaaagcctgcattccaaactgacttcatcacggaacccccttccaaacaatactttccagccttctgaagaactactttttataaagaacacactttgggaaatgatggtctaacgaaacgagtcatgaaaactgggtaaccccaggattttctcaagaatctactctctcattcacaatgttctatggaagctaagctgggtggaataaggctctatttggctttttctttttctattcttcagtctgtaacaataactccctgtgggttaatgccggcatctgaaagaaagaaaaatatgcacattaaatctcatgaggctacccagtatgtctgttcctcaggaaagggtcacagctggtcacagtgggagattgtccttggaattcccatcagtatcttttaaccgatgttgagatcacattttttttgtttgtttcccttcctgctaaatcccaggccatcagctctcatgccatgtgtttttccttacattatacagaaccacaagtgtttatcaaaagctgtcctttctgtgttctgcattatgtacaaaggctaaaaatttgacagagtacaactaaataaatggaaatataaaagctccacaaataggaacatattttgttgggagaaaaaagctgtgattatgtaagttttccttggactgctatttctgatcagggtgcttattacactatctgaaaggataataatgagtgtccaccttcgtgggtctcacatcaaacttacttgaggagctctgaaaaaatacaggtttttccccaactgggaccctctgaattagaatctccagtgacaagcttaagcacttgtatttttaaatgttctggacttcactctctggcatttattacatggcctttctttttaaataaatcatctttcaaaatggtcttgcctacatttttttttcctgacttcgatttaaaataacaataaagaatatttttaaataagaaaaatcaattccggccagaagtgacagctcatgcctgtaatcccagcggtgtgatagctcatgcctgtagtcccagctactcaggaggctgaggtgggagaatcacttgagcccaggaggttgaggctgcagtgagccgtgaatgcaccactgcactccagcctgggtgacagagtgagaccctgtctcaaaacaaagcaaaacagaacaactttccaaacacaaacaaatgatattttttcaatgtctggctctcatccttgttcatatagagaaattctggaattctgaatttgtcacttagcatttcatttttttaaatttccgtgctaccatacagtaattgtcatttttaggaattgcataatattccaacatgtatttatttgtatcataacttagctaaccattcctttactatcagacctttaagctatttctctatttttagttgccctaaggagcttgatatgtatggattttgcttttgttttgaaccaattccctcgggataattttctggaagtctggttattgggtcaaaggatatgaacgtttttttatgtctcttgttaatgattactaaattgcttcccaaaaggttgaacaaattcacaaagccatgccccaactccatggcataattgctgaggttttcagagaggggcagacaatactagaagtctgttggtttttcccatgacaaatcaataaatgactctaaaaatacaagtcctattactttacctaagaagaaaggcaagaagcctagtaataacaacagtattattatggcactgcttgaccatctcaccctctatgggccagcactttccttgcattctttctattatataattctaatatatattctataattctgaataccctaggaagttagatcttgctgctcctcagttcacagatgagacaagggtgggaagagaggtttaatgccttgcccaagggttatacagtgagttagtattgtaatgtggatttgaaccctgtattgttgggctttaaaattttattatttcgtctttttcaaaaacttaatttttttttttgttttcttttttctttctttgctgcttgaatcagaatgaaccctgtgttttacaactgctgctatgctatcaggttggtgcaaaagtgatggtgagttttgccattacagtttactttttttttttgagacaaagtcttgctctgtcacccaggctggagtgcagtggcacgatctcggctcactgcaacctccgcctcccaggctcaagcaattctcctgcttcagcctccctagtagctgggattacaggcatacgccaccacgcccggctaatttttgtatttttagtagatatggggtttcaccatgttggccaggctggtctcggactcctgacctcaagtgatccacccaccttggcatcccaaagtgctgggatgtgagctatcatgccctgccttacagtttacttttaatgacaaaacccacaattacttttgcaccaacctaattaatttcacaccattgattcctaaagcagtcccaaaatctcaccagctaggtgcctcctaattcataaattggctgtaaaatggaataagacacaatagatgcagtaggttaaggatatccacaatgtcctgctgcttctcccatcaagaggtggtctattgacccccccttaagtctgggctggcctgtgactttttttgaccaatagaatgcagcatcactacatcacacccagacttaggtctgacagcttcagtgttcaccctcttggagccccaagccactatgtaaagagaatcagtctttctagagagaccacagaagaaatgtgtggccagcccagctttttcagccatcactgctgaggctttagacatgattgtcaccatcttggatcctctatcctcagttaagtcaccccgttggcaatatgtggaacagaaacaaaccatccctgatgagctaaaaatcagctgttgttttaaatgctgttaaatattgaggtgctctgttatgcaacaaaaataactgaagcaatagggtttattttggtgaaaaccaaatgcagaaagagtatcagcaatatgttcagtcttcccaaaccctaacacaagcagaataaaactcactgacatttaccacctctcatgccacctagcacttaacctctatcatgacattgactctgctgcacgcagccttaacttacgtacacgtctcccttccctaccagattaggtgtaaattaccttggtaaccacagccttttacacaaggcctggcacaaaaaagttacttaatacatatttgttgaatgaactttgacttgctcttgattgattgatgaaagcacttgaaatggaataatagcttttatttattgtgctcagcattgtgcaaagtattttacatagattatttcatttaatcttcacaatgatcccatgaaataggtcctatgattatcttcattttacagatgaggaaactaagaggctaggtaacttgcttgaggtcacactgctaggggccagcgcagattcaaaccccactttgcaaagagaaaatatttcgttataaaacatttcaatcacacaaataactatagagatgaatgtaacacacaccaatgtacttctgcttccccaaagccttaaccttttatatttgcttcaagtctttacaatgcttttaaataaataaaatattacagattcagcttaagttccttgtgtacttgccattaggagggtacacagtgaacttcaactgatctacatccttttcttcctcctttatccttgatcccaaggtaaccatcaacctgaatctggtgtcactcatgacaggcaactcaggcctgtttttgttttttcgacgtatgcatgcattcacaggcaatgttttgtgggttttaaaaaactacataaaaggaatcatattgtttacacccttccatgccagaaatggcttttcctcagtcaataaatacatttttgagattcatccacattaatatatgtagctttttgatgctgtataatatttcactgtagaactacaccataatttatttagccattcacctgttgaaggaaattgtttccaaaaagaatttttttttgttgttattacaaacaatgtctcaatggacatttgtatacatgtctccctaagcagatcagtaacagtttccacctaggagtccagttgctggattacagtttacatatatctttaactttactagattttttccaaatgttgtgcaaagtggttgtactgattaatattcccagagcccagtttcttaaacattatgcaattgtctttttttttttttagacagggtctcactctgttgccctggctggaatgcagtggtgcagtcatagctcactgcagctttgatctcccagcctcaagtgattctcccgcttccgcctcccaagtagctgggactacaggtgcatgccattatgcccaactaatttgttttatttttatttttagtacagatgaggtttcgctatgttgcccaggctggtcttgaactcctgagttcaagcaatcctcccacctcagcctcccaaagcaccaggattataggcatgagagataccgcacccaaccgtaagcaaaaatcttgatatcagttctagggttatcaccaaacaagtgtttttaaagtatctgtgctgggcaaggcaatactttaggcatttgcagcaattaaatgaatgaagccattgcagtgtgtgcacaaaatcctaagaggtctggttggttgtgtcatggtagatagcactagctctgttaggactcacctccaactacaaaagtgtctcagagggccatgcaggtcaagccctgcacacgggcatccaacccaagggcaagtaggggctgaagtccaggctgggcttctgcactccactcaccatgaagcctcgcacagggctgtgcctgtctatggaatggaacacctgttgcctaatttgcataatgccactgaataggctcatggcagtcctgggtagaatgcattcatctgtgggaaactggtgtgcctgatcaaatgggagacagagattactaagaaatttgctaggttttagaataggtaaatccagaaaatggttccagagaaataggaggggatgtgtggaggttggtggcaatggaaaatttgggtgcagtgtctaagttctcatattgctatgtactctgccccatcactcctaggagtgggtcaccttggccaaatgtctcatccccagggaagctcctgtctccctgaaattctgcgagacttctgggtcttgctgtttcagaccatctcagctgcaactgtgtgcctaagggtatgcaaactaacaaaataaatatggtacatgagattgcaaaccttacccagaaagggttcactgcagtttccctacagattcaagcaattcaaatgcccatacacaggcatccagcatggttgggtggcctccaggaggatctcaatagttggaccagaaggtatctcccattgaatcaaatgaggtaagtaacagtgtttgatgatttaattgcttctctacatgcatgaaccttgctgtagttaaaggacctaaattggctgtggatagaacctcaccctacctgaaggagtctgcagagtttcttaggctccatttctaaactaaattccaattggaagaagctgggaagaatggagggggctctgggaagctgggaaatatggccaaccatattcctgacagccacccattaaacagaaccagaatcaggatcttaaataactagctaaaaaattcccaagtagtatgtggtggtgatggtgcctgggtagcaggccccttcatcacagcccccggatggggctcctgccctgggaagccagggcacctgaggttcagaggggagtcagcggacagccctcttttatcatgttctgaatgacatcacgttcccttttaccaactgctgtccatggttcaagaaagaagggcactgtgttaatttcctagggcctctgtaacaaaatactgcaaactgagtggcttaagacagcagaaatttattgtatcacagttctagtgggaagaagtccaaatcaaggtgtcagcagggccatgctccctctctgaaacctgtaggggaatccttctttgcctcttccttacttctggtggtttgctggcgatctggcattctttggcttatagatatattaatccaattttctgtcgtcacatggtgctgtctctgtgtctccctgccttcacatggttgtcttctgttttttttttttttgagatggagtctcgctctgtcacccaggccggagtacagtggcgcgatctcggctgactgcaacctccgcctcctgggttcacaccattctcctgcctcagccttccgagtagctgggactacaggcgcccaccaccatgcccggctaatttttctgtatttttagtagacacagggtttcaccatgttagccaggatggtctcgatctcctgacctcacgatctgcccaccttggcctcccaaagtattgggattacaggcatgagccaccgcgcccgaccaaaacataatttgcccaggctggagtgtggtggcaccatcacagctcactgcagcctcaacctttcatgctcaggtgatcctcccacctcagccttccaagtagttgggaccacaggcacatgccaccatgctgcactagttttttgtatttttagtagagacagggtttcaccgtgttagccaggatggtattgatctcctaaccttgtgatccacccgcctcggcctcccaaagtgctgggattacaggtgtgagccactgcgcccggcctggttgtcttcttataaagacgccagtcacactggagtaggggtctaatctatcccaggatgacctcagcttaactaattacatttgcaataaccctgttcccacataaggtcacgttctgaggtactgggggttagggtttcaacgttcttttgaagggacctaattccacccataacagacctgtttctgtataaactgctcccttggtctctggatttgcctccagtggcagttggttaatccatgggttccaagtcagatggcttgggtgaaaatcttgccatcgctcttgtgtgactaaggtctgtggaacagaaatacagtgatacagattgctgtgatacagaaataaatacagataacaagagtatctagtatttgaggttgatggaggattaggataaaggactctgcatggtgctgggcattaagtgctcattaagccttagttacttaagtgccattagtattgttattcccccagctctttccattgacttctctaggagtgggttatttattcttccctgcaggcacacatggtcctggggcataaccaaatgcatctccattttaagagaactgggagtggggcggagtgtgggagggctccttcagtgtatacatataaaggagacagttcgtatttattagcactaaaaaagttctttctgtagatgcttccaatagaaaagtagggcatttctcaaacatgtgcccctgaaattggagggactgccaagagaagaaaaccaactgactaattttttttttgagacagagtcttgttatgttgcccaggctggagtgcagtggtgtgatcatagctcactgcaaccttgaactcctgggctcaagacatccctccacctcagtctctggagtagttaagactacaggagtgcaccaccacatccagcaaatttttttaaatttttttgagacagggtctcactctgttgcccaggctgctatgcagtggcacaatcacagttcactgcagcctcagcctcctggagtcaggcagatcctcctgcctcagcctcctgagtagctgggactacaggtgagcaccaccatgcccagctaatgttttttattttttgtaagagacagggtcttcttatgttgcctaggctggtattgaactcctaggctcaagcactcctcctgcgtcagcctcccaaagtgttgggattacaggtgtgaaccaccgcacctggccacgtatcgagctaatttctaaaattttcttgtagatatacggtcttgctacattgcccatgctgctcttgaactcctagcctcaagagatcttcctgccttgcctctcaaagctctgggattatataggtatgagccactgcacccggctcattaactagctaactgttttttgtttttgttttttctttttttgagacagagtctcactttgttgcctgggctacagtgcagtggtgtgatgatagctcattacagcctcaacctcctgggctcaagcaatcctcccacctcagctctgcaagtagcaaggattaaaggcaagtaccagcctgtttagctaatttttaaaatttttgtagagatggggttttgccattttgtccaggctggtcttgaactcctgggctcaagcgatccttctgccttgggctctcaaagtgctgggattacatgcatgagaattaactaccttttaaaaagagactcacaaggtggcatttaccttgatggattttcccatggtcctgtgtcaagccctcacttagctttaaaacaggttcagaaacttcaccatgttcaagtcccagaactgaaagctgactcatactaaaaatattcacatgatgtacaagatacagaaaatgagagagggtaggttatgtaatttataatgataaaaatgtcattggtggaccagtgcctttcatcagtccgatcatggcttctctccttagtgagaatgatcagaaggctgctgggtgggtacagagtcagagtgaggggcttgggtcatagaatttaaatgaataatagcattgggttcagatctgactggtttgacttctcagagagcccagcttcttgattaaatgagattggacaccttcttcctttcacagacacttactacttcttctatttttatttttatttttatttttttggtctccttcgaatacttttattttttaccttcttattctgactgacatactcctttctggataaaatgttttgctctattcaccagattctaatttgttgttgttgttgttaaggtcaggattagagtctgatagaaatgatccataactaatctgtaccgaaaaaaatgccgtatttataagatcatgcaaatgatttcagggtgttgtggacaaccttgatgtcccaggttaaattcctatgcatcctaggttaaaattcctgccttaggcagaccttgcccatttttgagctgacaaagctgaagcctaacaaccttatcttattttcctcatggccaagttcttaggatcaccttccaccctcacctctcttctcattcctctactttctaatcttatattagggccaccgtggtgaccttggaactgttcagaccttgtggatacttcctcagccacaggtactgggttgaggtctaatggtgattgtagtcaatcctattttctcacctttccccctttgacttgtatcttgcactttctctagtattccagttaacacactcctcttttcttccctcattccttttttctggcaggctgtgcccatgtccccttgcatcgggtatgactgacatatttctctcattcaccgccggtctttgtccttctttctcataaccatattcatagccccatctcgctgttttactccttccatcttcctgtttttctttcctaccaatgcttccagggcttacatccctggacatcattttctcagtttctttctattcctacctccactactgctaagcattgccttttttttttttcctttttttttttttttttccccgagatggaatcttgctctgtcacccaggctggagtgcagtgatgcgatctcagctcactgcaacctctgacccccaggttcaagtgattctcctgcctcagcctcccgagtagctgggattacaggtgcacaacatgcctggctaacttttgtatttttagtagagacaggatttcaccatgttggccaggctagtcttgaactcctgacctcgtgatccaccggcctcagcctcccaaagtgctgtgattataggtgtgagccaccgtgcccggcctagcattgtctttaatatatctttttaaacatgattttcaaaccatatttgtatttcccattcagaccactcctctgagctccagacttgcatatccaacctaattactatttatactttgatgtcacaaaaacaatgggtcaaaaatgaaaccaacacttctctgccttcagatttctccttctcaggaaattgcaccccagttcacattgtaactcaagccagaagaatcatcattcattgcattcattgttcctttttctttaccaccaacaacatgagtaagtctgctcctctttcaaaatatatcttaagtccaaagcagtgtcttcatccccagagccataatccttagctcaaactagcatcatttcttacctgaaccacgtccagcatcctctttcactactctccctgattcgacactgatctctctctaatctgttcttcccacagcagctacagcttgcttttaaaaacagaaattatgtcactctctacttaaccctctttaatagcttcctattcattcacgaaacacatttttactgaacaccctctatgtaccaggccctcaaaaatccctgccctcatgaaataaatgaagtctagacaggggtaagggttatgaaggaaagatggggtgagggatggggagagagagagagagagagagtgtgtgtgtgtgtgtgtgtgtgtgtgtgtgtgtgtgtttacaatttaaaagagagtccaggccaggcacggtggctcacgtctgtaatcccagcactttgggaggccgaggcggacagatcacctaaggttaggagtatgagaccagcctgaccaacatggtgaaaccctgtctctactaaaaatacaaaaaattttagctgggcatggtgccacgtgcctgtagtgggactactctggcggctgagggaggagaatcgcttgaacctggtaggtggaggttgcagtgagctgagatcgcaccactgcactccagcctgggtgacagagactcctcaaaaaataaaaaataaaataaaacagagagtccagggaagacttcactgagtctgagtaggtgacctttgagcaaaggacttgaaagaggtgaagacagtgagctttgcagaatattccatgtggagggaggccctgaggtagagtcatgactggctttgggactgaacagaatagaataaaatccaagcttcactatttactatggcaaatactaagtatttactaaggcagcccaggcccctattcccccaaaaaacaaagacaagaaacgatcctctttatctcctttcctgacactccctccctcaatacataccatccacactggtcttccagtttaccagaagttgtttcctgctttttcctgtgttgtgcatctgctaggaatactcctccaacccttatgcccgtatacaatttgcaaggctggttccttctcatccaatgggtctcagtttaaatttcattttaggccttttctgaccacaggacctaaaacatttgggctctttttggccgggcgcggtggctcacgcctgtaatcccagcactttgggaggccaaggcgggcggatcacgacgtcaggagatcgaaaccatcctagctaacacggtgaaaccccatctctactaaaaatacaaaaaattagccgggcgtggtggcaggcgcctgtagtcccagctactcgggaggctgaggcaggagaatggcgtgaacctgggaggcggagcttgcagtgagccgagatcgtgccactgcactccagcctgggcgacagagcaagactccgtctcacaaaaaaaaaaaaataaaaaatagggctctttttctttctttcctatgtcagtttcctatttgtttccttcctgacatctaccacaccatgcaattgggattcatatatatatgaatttgacttaaatctcattaggtatagtaaatggcatctgtcatttaaacttgcatttgatcactagtgaagattaagcattttcccaagtaattgttagttcttagcatgatctattttctatattttggccaaacaaatgttcatttaaagtcactttgttttaaggatgacagcagggctggacagccaaaaccctaccctctccatttattttggaggaatttattttcccaaggtcctggcagagatagtgactcaccgtgactatctctgcaaaaatcattccaaaacccacaccaattcagagaaaagtgcttcatttcgataacatcgacttgtgaaaacgagcaagaaagttgcatttgagtggtaccaggtttcaccattatgcagttatcgagcaattattaatggccaacccaattatacgctacaaggaaatgacggtcacagggaagctcaaagccccgaagcgagggaagccctgctcctcaccggcccctccgccttttccagggcgctctccgtcccgaggcaggagatggcctggttgacccttcgagacaaggcggcaaaaccggtgctgggcttgcggggcagggaatcaaggttcctccggttgctgtaccgtcccgcccggcccctctcccgggcaccggagagatgacggctctctcgcgagagcgcgagcaagacccggctccgggcggcggcgggatgttagcccagcgctgtagaccgcgccccctctggcgcagctgggagaggcgcggcggaggcactgccgggagcggccggcggcgcgcacgcgcaggtgagcggggcgggctcgggagcgcgcgggcacaagggcgaggggcggggcctgcgtcgcgctgcgggcacgtcgccgcgcgtcttcagtatttaatgtctctgtgttccacccgcctgggctagcacgtgggggagctgcggaagcgcggcgctgcgggccgggccgcggggcacagccgggggccggcggcggcgcgcggactccgcatcccgcaccccgatggtagccgaggagctggtaggtcgggggcagctgcgccggggaccccctgccggagacccgaaggcggcggggtcggggcgatggggagcctgaggtgcaggtgcagggtgcgacgcgccctccaggtaccccgggggcgggacgctccggacgcagaggtgtcctgggggctctcggccgccgcgcgctgtcaggcaggcccatctttccctccctcgtctgcgccccctctcgtccttccccgccggttgtctgcccgcgggctcctgacagatcgcgtgtgcgcggctctgggcggcgctctgcggccgcgccgtcctccccacgcgcgtcactgtcctcgggggcggggggcgagggcgcgacgcccgggtcgcctctctgcacctcaacttaaccggagcgtgcacacccgcctgcgaggctgacccgagcgcgtcccacccaaggtcgcccagccccgcgggcgtttacttttcaaaggtcgtgtgtacacagtctgagccggagctgccccttcacttctggagcctcgcccaacttctcaccctcggctcgcccgccggcgcagcccctgggagttccgtgcggcgagccaggggaactgggaagatgggccgggacatcggccggttgtgatccaaccgtgtttcgggctgagggaccgttcgaaccgaattggggtctggaggtcggaggctcaggggcgtctcggggggaatttgcattcgtagcccctgcaggcgtgtccggaggggtggaggccgtccagcctggggtgtctgccgacctcacgcccgggggccccgacggtcacgtgtccggccccgcctgcggcccagggcccggggtctgcgatctggagggaccgcgccagttttggggttacgatgtgctaggagaggcagtggctggatgcctcgaacgcgggctttctggcgttcaactcttttgtgccctagctgaaggtcttcctgtttcccttccagggagggataggagaagaaaggtgctgatcgtggtaggcggtgctgtggcgactcggaacggcatgggagccctgggcgtttcgggatcttcctctcctgggggatgtcctgggtggcggcgccttcctgccgccgttaacacaaacccggtggacttcgctccaggtgcgagtcgaggcctctcaagctgggtagggtgtatgcgcagggcaattagtgaggttaacctgggtatctttcccctactgtagtgcgcgttacttcgtgtttagatttgtctccagtgaaatctaggctgctggacctggtgcaacagtatctgttagttactgatcaaggaacaccgttcacaaaaagctattaattctggcaactagtagccttacaagctcttgtaactgctaagtccttcccaaattagtaccttttttttttttaactctttatttagaaagcaaagcttggactcttagcaccacccatccactttgctcttaaaggtacagaacatctttgaaatgaagaaggctgcctgacttgatcatttatataattcctctgatcttggcattgaagtggttcacctgctgattatttaagaccctgagcactggaagcaagtgaagttatgttttgggaaccttttgacttgtgttgaacttttctttaacctctaactagttttgtaggttctgcataattcttgggtgtattctctttgaaatatggccctaggttagaggaggtcctctggatcctacaggcatgcaaatcactaaagcttgagtccattactggattaataggctctgtcttcatgcatgttgtcagatgatggctcagaacttgcaggtaacagatcctagccaatgagtgagacaggtctaatggatttgtgtctaggtctagttccttgtaggaatatctctcccatctcccagttgtttctaggaaatgcattctcacttggccactgcagggtgacagtggaggtgtctgttgtaagtggcctgctcaggtgctgaagtcgatatgtctccagtgtaaggttgctgaacatcaatatttaaaagcaatttatcttgctgcctggtaacccaaattattcttgagctttggacataggctgggttgcagccatattttaggggaaggctggtgttagcctctacagtattcccttttcctgtcctaaagacaaatggagatcatatttgtgatactggggactgtgataggtgcttaagcattgctcttcccctctcctccctgaacaatccctgagactgactttgtttctcttgaattacttgagtgacttgaattctattaaaagcacccctctccttagcctctgacccagaagcttgtttgggaggaaaaacgaattggtttccctaagctttgctggctagcctcctgctcccagcctgcaacatgacttgattgtgtgtgcatttcagggctttgaagagcaggcagcttgtagccaatgtacccagagagctggccgtagagttcccctaggtcactccttcctaatcttccctgtgagtctgaatgattgggcctttctgtagcttggtctgttttcctattgtggggaagtcagttgtttcaggtatgagttaataccttcagcttgtcattctcaggcgttttcttccactatggggaggtagtagatcctgtgggcatcttgtcccattgaaatcatctcatatactgtttgagagttgctcatctttatggtggggggtgtattttagtcctaaatcttgcttcttagggcaagttctgtttcttccatgttccttcctggtgtaatacctcaggcagttttcacttttatgatcatttaacattaagttcccatcacatgtggcatcccactgaaggaacctcctggccttggtacctaatttgaagcttgggctgtggaaaacatcatcagtgagcatgtttgaagtaggacagagtctggctggagaaacaggtagtgggggagctgggagctaaacttgagaggatgcctctttcttgatagttactgtgctaggtgagttatgagcacactaatcctttaatcctcacacctctgagaacagtgagggtgaagctggaggtcattctggattgtttcagtggctgtcacacaaattcaaattgaggggtagaggaactaggaagcgtgggtgtggagttaaaactaggtcctctggatggcttttgtgagaagaaccaaggaatattcttaaatccctgggcttttctcctaatctttctgctgctttctaagtagattgttaacattgtgtgtgttatcattcagcattctgagaactagctttccagcaataaatagctttcaaggtgtcctttgccttaactttttcattttactaaatggtgcagccttgtccacattctgtccgggtcttcaccatctggttgtttttccggcttggtttgatagtttgcagcagtcagtggtaaacattgtgttccctgttctgtaatggtggctggttgtgttcaccgagccaggtgtcactaaggcccagttgcacttgggagcaaagaagggccctgaggtgagtcctggaagtaaaaatatgtataacctagggctgatgaggcttgtttcactgctgggcttagctgacaagagcctgggacttgctgcagctctcagagctgaaacctggcggtgattctaggcaggctggttggccttccagatcttggtttattcagtggctaaaagaggtttggtcaaaattatcagtattcagattatggtcctgggagccttggagttagaccaaacgtgcccaggggccactggagtgatgtgtttgggctggggagcacagctcaatgggtagtacatgtcaaagacttaaggggaaaaaaaacaactcactgttcatctcaagttcttagctctaaggtgtgctactgttctaaatattttttatttttaaagatagctttatttgcctaaatttgtcctgggtgtggggagtttagagctgccttgtctgtagggtagctgctagctgtgtgactaattaaacttttcaaagtatttttaaaaaaatttcttagtgacattagccacatttcaggttctcagtggcctcgtgtagctagtggctgccgtcctggtcagtacaggtcaagaacattttccataatcgaagaaagttttgttggacagcgccggcctagaaagtttttttttctccaactctaaaagcttaattgtctcaacttgtaaatctctaaagcataacatgtttgagcttagtcttccagagtccataaacccaacagctttggtgacaaattatctactggttgtctccatggcatactacaagtgagttctagtctgccagttgggagtggacgaacagttttgaaacagtttgagtgaggaccttcagaaaggacctggggacaggagcgtgaagcaaaggtccagatgctaagcccttagaaagcccttttggtttgaagccgtttattatcataaagatccctgctggtttgtccttggtctccaaatgtcagatgtcaacatattgttacttggtccttcacccacctgatgacttcctacagatctcagtgcggcccttctcttaaacgaggttgtgttttcattctgctgtttccagtccacctaaatgttaggggccattcttcacagaaggtgttgggggagagtggggccacagcgtggatgctaacgtgttctgttgtggcaggggtggggagttctttgtttccagatgccccctcttctagtcctgggtgtgctttgtttgaaccctgctagattgacctttggtatatataatgtgagatctcttttcttggagccaggcagcataaaggacacttactgatgagcacctactggcatattagtggcttttttttttctgtgtcatttttattctctgtcagccctatgaggttagtacagtgattagtttgtgggtgaagaaacaagatccgagtagagtaaactggtccctggacacagcaagggctggactggcttggacctgggctggggcgtgctccccacctcctcctctgcccctgccgccccccatgctcattggttgttgcttatttactgcccctttatcaccacatcctcattcaggaaactaaactgggttttacaaagattaaaatcattgatcccacatatggagtctgacttaagtgtgttcagcctcgttacaactctgtgagggagatattccctattacagaacatcttcattttatgggaaactgaagtacaggatcctactcttaactctcttgtctttccaaagccatattttatcatcagaattatgcaaccatcgggtgcttttgaaatgcacaagtaatgactatgaataaaaaaagctgtgcctgagggctcagggaaactgctctgaagactgagctgattgaaaaagacaatcctgaagtcactaatttcccgacacctgtcagacctcacttggaggtcacagaccatctcctggccctccaaaggctgtcacccagcagtagctggcctcctgattagaggaggcagtaagatcttttcaagcacagccccagcccccatcccttctctggcctgggcctggatgtgcctttgtgaggttgggtcgatgacagatctgaaggacagttcagtcttctgtacactccttcttgcccctcctttctgccactcccaagaaaaaggagcaggagtgattctcactttcctgaactgccttggagggagacccacactcagctgtgcctttagctgtctctgggagaaaaggccgtgctgcaaataacctccctgctttgtcctttggctttggtgtggctcacctggccaagcatgtgctggtgctatttttagcaggtggcatcctttaggagggccaagtgcatgtggctgcagtgtacgggacaggtcctggtgccaaagctgctgctgtctctgctgccaccgcctcgtcaggagagagaggagaataaagccaccctggaagctgccaaggggtgtgtggagggggtggctgcttaagaggtctccagggctgccttttctattctggatctgtggcaggggcccagcctgcctcctggtgcaggcaggcatgtgactgaggcagcccggggagctggggagctggggagctaggtgtcagactgctgcctggggagtgaggaccccttgttgccccagcaggcaatttttcaggaaaccacataaccccattaaaaacattatttatttatttatttatttatttagagatgaggtcttgctttgtcacccaggctagagtacagtggctcgatcatagctcactgctgccttgaattcctgggttcaagggatcctcctgcctcagcctcccaagtacccgggactataggtgcacatcatgatgcctggctagttaaaaaaattttttttgtagtgatggggtctcatcaccttgcccagacccatttcaagactcctaggctcaagtgatcattccatgttggtctcccaaagtgctgagattacaggtgtgagccaccgtgcctggccccataacttcatttttgtgtgaagttgcccagcctaaaggctggccactaaatggacacttaaaaactctctaatagtgtggattggtgggcagtctgattcctctggcttaaaccaaaatgcaaacatgaaaggaggcatggccatagacccccggtgagaattctttactgtgatgacacagaagctgaagagggatgaaaaagcagtttgaccagcaagcttgctggttccctaggccaccctttcttctctccttttcagttcctccttccctctaacttggagctgctaactccagcccatctaactgtttctgattaagaaagcttcaagccttataaggccctctgttgcctatggtttatgttggctggagagcaaggttgttttttgcaaagtctgattcaaagaagtggcaagggcttacgtaggctgtgtgtgtccgcctcctggggctggactgccttattggaacaggttcctttgagggagcctgagagtaaggggggcttattatcccttacccttagtggtggctctgtaaggctaatgtgtggtgtggccacagggcttcctggcaagtgtattcgctgagaacttaaaggtaaaagcaagcccctgtttacctacacagtgtacctgtcatgctaccagccacagaggcatcctgtttcaggaatcaagtctggaagcagcttctgcttattaattaagaactaaagccccttggctcttcaggcacatcgctttcccctctggagaaagtttggtggaccgtgtcccttggggttcttgcgagtccgactggccttccgcgcagtgatgttggagagccctttttctgagagccatgctctgcctcatcttcacctcccctcttgctacctcttgagtcagccaagcctgttcctgccttaggactttggcacatgttcttcctgcctggaactttctccccgctctcctcctgcttccccccagatcttggcacagttctcaagtgttccagttctgatgccacctcttccaagaggcattcccgcctcattctgtctgcagcttccccttccaagtgctccatccagcctttctcatttcaaccacagcacacagaaaaggactaggtgaccgttcctcaactctcccagctggtgccctgctacacgcacagggatataggtaattcatcacatgcaagggcagccttagggctcagttctctcaatcagttgagagaggctgcaggtctttatatttaagtcgcggaatctttgcagtatcttacctgtaatttgactctctacccttccttccacctttgcttcctgagggatctctttgccttatgtgcccagcgaacttggctcacagtgcgtgttaaactctttgttaaatgactggccctgagaggtccagccatctgatgctggctagccctcaatgccttgcttccagagggatctaacctgtcaataagcatgctctctttttgatattactattatgtcagctgggcagctgggggtctctgaagcaaaattggcatcaattattataggaaaataaggccttacaagtttgtacacagatgagttgacattaatgcaaatttaggatggttaataagaaacataaagctgtgtggtaatagagcatgcattgctacttgtatgtatcttaataacgtgttttctatcaaaacattacttgtagaaaggatttggcttttgactgtgtacaaggcttgaaaggacagtcctttgcccactgccccccacccccattactttcaattcttccagctgtccccaccattgtcagtagtattattttctttctttttaaggattattatctgatttgtttttctgctgtgggagataggatttagctcgttcctatgcttttttcttccctcatcatcccagtgtagagatagcccaagttttggtcaagttgatcttcagaatatacattattataatatgaaccttgtttatggctgcaaggtttttagtttcccatatttcttcttttccttcattttcttcttctcctctcctagttaatttccttagtttcttttgcttaattttctgtctctctcaccagttccctgaccacctcgcagcctccaccattgctgtggaatgcctgtcattgggggaaagtggctctcactgtggctccacataccaggtactcgcaacggttccacgtttctcctgggcgcatcccttttccctggctctgcttccccttcagccttggaattccctctccccttctcttgtctcgtttctggatccagtgcccctcctttcttggttgatttccttgtcttgggggagcccatcgttcagtagcttgctgagaaggtgtgcgtggtttgtggcccacaagaagccagccgatccatgcagggacaggcacctttgaaggcatggattgggccttcagttgggtggctgaagtcagcagacaactaggcctgtggagcccttccgccaggccaggccagcagaaggtctggcttcactttttagagaagttataaatgtggcgatctggatttgggtaccagggagtggtgaaaatgggtcccccccaactttttttttttttttttttttttaaagacaggtctcactgtcccccaggctggagtgcagtaatgccatcatagctcactgcagccttgatttcctgggctcaagtgatcctcccacctcagcctgctcagtagctgggacaagaggcatgtactactatgcccgactaattcttttaaatttttttttgtagagatgaggtctcaccacattgcccaggctagtctcgaactcctgggctcaagtaatcttccaacttcccaaagtgttgggattacaggtgtgagccatcgtgcctggctgaagatgggtcttgaatgaaagtctatatattgaatggggcatcccaactctccttggctcccataatgctggcattcaggcttatattctctcattcctaccccaagatactagaacattctagtctgaggacactggcaccccattttctgttcctccttcacccctaacagggcacttccatgtcctatggacaaaactttcagttggtcagtagcagagagtggcagtaacaggcccactggagaaaaggtcattgcttgttttttgagacaaggtgtcactctgttgcccaggttggagtgcagtggtgcgatctcggctcactgcaacctctgcctcctgggttcaagcaattctcccacctcagcctctcgagtagttgggactacaggtgtgcgccactatgcctgggtaattaaaaaaaaattttttttttgtagatacaaggtctcactatattgcccaggctggtcttgagctcctggcctcaagcaatcctcccgaagtgttggggattgtaggcgtgagctaccgtggtggcctgtttgggctttttttttttttttttttttcttctgccctccactactccccgccaagactgaaagtgcctcgagggcagtgccttgcctgattaatttgtgtcccaccatgcttttctctgtgagtgccagtaattatttgttgaatagaaattaccttctatgcttttatgtgatttctggggtggtcgtagttcactgtctgccattaggaagatcagggtcttacctctttggttttgcccatgtgaggtgctgcgaagggtttcttgctgcacaccaacatcttttctgatgtctttactggcttttaagtcaggttgttgtcagattgccatttcatactttttgggcagttttgtgtaatgtcttctgtggtcgtgggcgggaactccatgtacccaggaaggcattcctggcacctgtgttgtgaccatctttagaaacctggcggaattcacttgtaaagcaagatggttgtcaaggccagaggtgaggggcaaggtgagtgtgacatagtcttcaaagttttaaaatccacacccctacccccaaaatgaagtgattaggaagacctttgtaggaggtgctgatgatttttccttcacgaaaagaggcatgtgacttggacctgccatggatttggccagcagagcaggaaagagactgggcagttcaacctcgggtactaagttttccagagcaggagttggtttaacttttagttgggctggcggagctcttactttgaggccatgtccagagatggtatttctggcttttggcttgtcttgtcttacctagagcacctggtagtggattcagggttttcattttggccgtagaaggctttgccaagcaggtactcagacactactgggttaagcttctggccttccttctgtgaattgggctgggaaagtgtcccgagttcctgacagctgctctacgtggaagggcagaagcacccacaaagtgtgctggtctggtggtgctggcccccctggcttctctgtgggccatcacaatggagggtgggggacagtcctagacaggacctcacaaccccactgtgagctaatttgggatctctagggtacccacatgaagtcatagcttactgtgacttacacaggcccctgaggatgaaggtaacagtcctgtgagcactgaggctgggctgggaccaacacctgagccatggctccagcactctgattcctggcccagccatgctgctgagggtgcacagcccaggcctaccatcgcccccacccttggtggcagaaccgagcactacccagcaaggtaggtgttggcggctgcagcatgtatccagccctcctgttcattggggccttctgggaacaccctttagagctgcattgtccagtaggtagctgccagctgcaggtggagagttcaagttaacctaaagtagaattcagtgccctagtcacactggtcacatttcaagtgctcagtaacctcccatgactaagtggctgccagtattggatagcagtcactcttgagggtcaccgagacctttacctcttgtgacctactctactttaccatgttgcaactgctgcgactatggctcctgtggcaaaggtcaaactctttgtctcgcctgaccagcacttcagctcctaggatttcttcctgttttactttgggactcactgttccctcccatgcccaaagatattagaacctcaatttatgtcctgtccccctccctacccacccactgcagcctaaggaaatcctggccctctttgagaaagccttcctgggctccctttgcccacttctcagctgcttgtggcgcaggggtgtgtgtgtgagtgagtgagagagattgattcttccatcagaatcgtgtgcttctggtgatcagaatcttctgcttatagcaacttaaacatatttgaatgaatgagcaaggtgaatgactgtgacctgatgaggaaataggtaaatgcatctgatacaagccaagaggcgcttttggaatcttgcggagaactccgagtttgtgattttcctcgaccaaactcccatggaagggagtatgcctctgcctggccacagactgctgtcattctctgaatgcagtggctgaagtgctgggctttaggttctgattccctgcccttggaagacccccttcaaggggaagagtccctcagcaggaacttaatgagctgggcactctggaggtggagtgtcttgggcaggctccttcctattggtagaacacctggggacagcctttgtcagtgtgaacactggaataatggaagaaatgttcaaattccagtgtaaatgttcattcagaacgcaaagtggatgtggcttcactgaccaggcccaagcccacattgggcttgttgggcacttggctcctaagctgttgtttttatggtggactttcccatcagttacatgcggctctttttgcagtcactgcagccaaattggcttagtcactgggaccaacactctctgtaccattgccagggatttgttttcttgtttagcagaaggctgtagcctgcagttaccaggtttgtcagctgagttgagagtgaggccattacttttctgagggctgttctgagaagctgcaggtacctccctggagaaagaagagatcctttggaacctggagtgagcagatgaatgctgaggcctgtggctgtagcacgtgcctaacttcagctctgtgtgaccacttggcaactagccagtatgcatctattcccaggcaaatggacctgctaaaaataagcaggcagctatttaattccaacagattcaaaatgacagagtgtcctccccaccaaccctagggcagggctctgcagcatccttctgggaggcttttctctgactgcagacaggtctgcccttagtcctgggcctgggggaggagccagcctttgattagcttgtgagtaggaaggctttggggactactgtgataccacttaaatgttgagaagttcaggtttacaaaaaaaaacacctcagggcaaagagagcaactccgaagagtctggcccagtgcaggaaggaagatgtcagaagagccttgtaaggctaaaggggtatgtgtatgtatgaaaagaggtggcactacctgggcactcaggaaagcctgatgcattttataccacctcttgtagccctgtcggaccacgtaaattgggcaaaatggcatcttaccaattccaagaagtctgtttgactgaggtgagagtggctcaggggtgagggagtgaggggctagctgatttttttttttttttttttgagacggagtctcactctgttgcccaggctggactgcagtggtgcgatctcagctcactgcaagctccgcctcccaggttcatgccattctcctgcctcagcctcccaagtagctgggactacaggtgcccgccaccaagccccgctattttttttttttttgtatttttagtagaggcggggtttcactgtattagccaggatggtcttgatctgatctcgtgatctgcccgcctcggcctcccaaagtgctgggattacaggcgtgagccaccgcacctagcctagctgatttcttgactagtgggaagtgggggctggtagaggggcatctgtgaggtgtctcctggcaatgggtgcccttagtgagacccagccaaggcctgctgatcccagggtctcttggctctgttcttgttggaggatggttcacatctctaggcacaattccctggtaacaaggaaaaaaacacatcttccactctgctcttcggggatctggtaatctctgttctcaagtgctggtggagcgcttcaagccaggcagtttctgttcctggaagcaatggtgtgagaagggctttatcttgagccactcactgcatagaagcagtgacacctggttcctgattgctcagccttgggtctctggctctagtccagagtgcggggtgaaggctggggagagatgggcactgggaatttaggtgggacatcctggattctgtgggttgggtgaaatgggtagcagtattcagtgccttctaggaggccatccctggcttggaaatgttgtagaaaccatgttttccaggcagtaattcttcagtagctccagtgactataggggtgactctagaggtggtggtctgagggcttagagcctcagtctctggggaacaagctgggcagggagggctagtggtggtgtcctggtaaactacagagcagcaggcagagatgggtgttgtggcctgcagtggtgattctgtgcattctgtctgaggactgagaacagggcaggtgaagtgcagggagcctagtgacagaaggtgctggggactgggtatgggtggcccagggtacaggaccaaagccagggcagaggtgcgtgctttgagtgttgggtctctacctcactgtagtatagcccccttatgggatcttgggaggctgggtgtggtggtgtggtgtgggaccagcaactaactgctggagacaggcaggaccccttgggatcaacttttagttctaaaggggtggggcttctcccagccatcttgagaggtggtttgtgttttgagcagacagccaattagagtctgcggccttgggcccttgatatgtaaaataaggagaactagcccccggtggggtagctgttaggattgtttttcttctctaccccatcccatttaatctttttcctgcgatcagataattgctatgggagtcacagctataaatctgggtgaaatgggattgcctagttaataaggaatcacaatctaaatttactgacctggccaggcgcggtggctcacgcctataatcccagcagtttttgaggccaaggtgggtggatcacttgaggtcaggagttcgagcccagcctggccaacatggtgtgaaactccatctctgctaaaacacacacacacacacacgcacacacacacacacaaacattagccaggcatggtgccgtgtgcctgtaatcccagctacttgggaggctgaggtgggagaatcacttgaacctaggaggcagaggttgctgtaagccgagatcgtgcccactgcactccagcttgggcgacagagcaagactctgtcttaaataaataaataagtaaacaaacaaacaaactgaccggatgaaaacctgggtttagactccactcctcttcctgctggcatgtgccctgttaggtaggatttgaatcttttgacagcaggccacgggcacactcccctatccattgcagcctttcctcatagccactttcccgtctcaaactgtccttactctttttttttaaattattttttccagccagaccaacatggagaaaccctgtctctactaaaaatacaaaattagctgggtgtggtggcgcatgcctgtaatgtcaggtactcaggaggctgaggcataagaatcacttgaacccgggaggcggaggttgcggtgagccaagatcacaccattgccctccagcctggacaacgagagcaaaactcccgtctcaaaaaattaaataaaattatttttattgggcagcccccaaactagaataggtgtagggagacttccctgtctttactcttttatttgaaagacaattgaacacaaagcaaatacaaggcaaatctcccatcattaccacttttttgggtgtgggcgggttattacagaacagtgattctctctttcttccccccaggatggggtctcactctgttgcaagtgcagtggcacgatctcagctcactgcaacctccgcctccctggctcaagtgatcctcctgcctcagcctctggagcagctggaattataccacctggctaatgttttttagagacagggtttcacatgttgcccaggctggtctcaaactcctggcctcaagcgatttgccgccccctccaccacccccaacccccgcctcccaaagtgctgggattttgggtatgagccaccacacctggcctcagaacagtgattctcaaacttgactgcacattgtaatcaccttggttttaaaaaaaccctgctgctggggtctcactctaagattctgatttaatagggctggtgctgccttggccttgggcttttaaaagcttaccagatgatgctaatgtgaagccaagttggagaaccggttgtgaaagaaattaaaaatctctcctcccaaaaggaggaagtaagactctttatctgtaggtaagaaatcccaaggaaatctactaaatggttagaattagtgagttcagcaagtttgcaggatacaagatcagtgtgtagaaacttcccctctcctacaactgaatggcttgttgtgtgtccttcccagtttttccatgggattatgtgaacatagacattccatacacatggtggtctgtacctttttgttttacgtatccaggtgattttttccatgtcggcacatgagatcaacttctttcggtaacatcggtatgtcagtggattccataatctacctagcagtgattcccctgaaatgtttgttaatcccaattttgtttcaaatgatgcctcagcctgtgcagaggtacgtgggttaaaaacattttgaaaaaaaattttttaagggactagtctcactgtgttgcccaggctggtggcaactcctggacttcagcgatcctcctgtctctgcctctttaagtagctgggatcacaggtgcttggctttgtggatttttctttgttgtggttttgtttttgtttttttaatttaaagatgccaagtgtgggatttcagagttgtaggatgtggttatgagcttttaagagctatcataaggctctccggaaaggtagtacagacttccccttttcttggctcatatagcgcctcttccccacagttctagaataatgggttccagatttaatgtgggagagaatttaggtacccatcccttggctgtatgccttgagcttttttttttttttgagtctcgctctgtcacccagactggagtgcagtggcactatcttggctcactgcaacctctgcctcccgggttcaagtgattctcccgctcagcctcccgagtagctgggagtacaggctcccgccacaactcccggctctctctcttttttttttgtatttttagtagaaacagggtttaacatgttaaccaggatggtctcaatctcctgacctcgtgatccacccgcctcagcctctgaaagtgctaggattataggtgtgagccaccgcacccagcctccttgagctattttaaccttcaagatagtaattcatttggctgggcaccgtggcctgtcatcccagcactttgggaggccggctggcggatcacctgaggtctcgagttccagtctagccaacatggcgaaaccccgtctctaccaaaaatacaaaaattagccaagtgtggtggtgggcgcctgtagacccagctactctggaggctgagacaggagaactgcatgaacctggaggcagaggttgtaatgagccgagatcacaccactgcactccagcctggacgacagcgagataaaaggaaaacaatctagcaaggttctgtgtttgaatgtgaagcaaaacggtagcactaaatttcttccctgaggaattgatgtaaagccttagccctggccactgcctagccctgcattgtgcttcaaatgctatcattgctgctgcttcaaatatcagcaagaaagtttatctttaaagatatagggactttcaaatggaggtgaccttctcactaccactgcccccacttcatcacttcaggggcagaacacacctcttagcattccttcacaaactgtaaggtccttctcaatcccctagggatcttgttaaaatgcaagtctgaggtgagactgggatactgcatttctagcaaggtcctaggcaatattcaggacttctggtacatggatcgcactttcagaagcagagtcctagagtagtggttcccagccttggctggaaagtagaacctctcagggaacttttaaaagtactgatgttctggttctgccagaaaacaatataagtcaaaccaatatgagttgttaaaacatgtgcatttgttatctctaaaagaaaacaaacccaaataaggtgtaattcagcttgtcagttgaaggatttttggttttaaaaagacattactttggcagagagatttaaagtttgctggcataggaagcattgaatgtaagtgttctagaataagcccatcatatacctttagtgagtgttaactgctttgcaaagaactttctatatctcagctaatccttataccaaccatccattaagagatgtgtccccatcttacagatgaggaaaaattgagttttctatcccctttacatgtctgttgccttcttctaggcccttactattcctccttgcttagacctaactgacttaggtttctaggttccttctgctcgatatacttcacttttcttttttgagatggagtcttgatctcggctcactgcaacctccacccccctggattcaagcaattctcctgcctcagcctcctgagtagctgggattacaggcgcctgccaccatgcccagctaatttttgtatttttagtagagacagggtttcaccgtgttgcccaggctagtctcaaacttctgaccttaggtgatctgccgagctctgcttcccaaagtgctgggatttcaggcttcaggcatgagccactgcgcccagcctcgattcacttttcatcctgttcccagaattgccttctagaaacaatttgatgtgtgtgccttgcagacctatgctggttctctgttgtctgcaggataaagtccagactacgcagtggggccctaggacaccctcactgaccccacgatggtacagatgctcctcagcttacaatggagttacatcctggtagacccattgtaagctgaaaatagcataaatcgaaaataaatacatctaatgcacctaacctactgaacaccatagtttagcctaggctactttacatgagctgagaagactcacagtcgtctacagtggggcaaaatcacctagcaacacgatccactctggagtgcccgttgttcacccttgtgatagagtggatgactgggagctagcattgcgagagagtagcgcatcacctattggtagtccagggaaagatcagaatccaaaattggaagtatagtttccactgaatgggtattgtttcccaccattgtaaagttgaaaaattctcagttgagccttggaagatcagggagcgcctgtatttgaatcttccaagtctgacctggaccttcatgctgcagtttgctgtgttggtccctcaccctggagcatctccttagccattgggaattttattcctccttcattctcactgtctctaattgctgagtaacaaagttccatttcattgactcatgattttatgggtagatgtgagggaaccatgcacatgtggattccatgggggtttgaaatgctctgatgccacttgatagaaaaaaatgttctgtgagtttagagaactgagccacactgagcagagctagcccctttttggggaacatagagagaatttggcatcatgaagtgatgaagggagggatttgggttaaagaatagaatgctcggtttgtttcaagagggtgcgtgagttggggagcatggaggggaagatgcctcttcctggccactgacccccagtggatcacacagagggtggactggtacgagctgagaggtgtgctcctcttggagggcagggaaggcggaggagatggctccagctctaccctgttgactgtcttgcatgtgcggttgccagtatcctcctacctggctctgtaacatccctcctccccgctctcctgctctccccaggtgtaattacttcaagcctccaggatggcaatccagttccgttcgctcttccccttggcattgcctgggatgctggcgctcctcggctggtggtggtttttctctcgtaaaaaaggccatgtcagcagccatgatgagcagcaggtggaggctggtgctgtgcagctgagggctgaccctgccatcaaggaacctctccccgtggaagacgtctgtcccaaagtagtgtccacaccccccagtgtcacagagcctccagaaaaggaactgtccaccgtgagcaagctgcctgcagagcccccagcattgctccagacacacccaccttgccgaagatcagagtcctcgggcattcttcctaacaccacagacatgagattgcgaccaggaacacgcagagatgacagtacaaagctggagctagccctgacaggtggtgaagccaaatcgattcctctagagtgccccctttcatccccaaagggtgtactattctccagcaaatcagctgaggtgtgtaagcaagattcccccttcagcagggtgccaaggaaggtccagccaggctaccccgtagtccccgcagagaagcgtagctctggggagagggcaagagagacaggtggggccgaagggactggtgatgccgtgttgggggaaaaggtgcttgaagaagctctgttgtctcgggagcatgtcttggaattggagaacagcaagggccccagcctggcctctttagagggggaagaagataaggggaagagcagctcatcccaggtggtggggccagtgcaggaggaagagtatgtagcagagaagttgccaagtaggttcatcgagtcggctcacacagagctggcaaaggacgatgcggcgccagcacccccagtcgcagacgccaaagcccaggatagaggtgtcgagggagaactgggcaatgaggagagcttggatagaaatgaggagggcttggatagaaatgaggagggcttggatagaaatgaggagagcttggatagaaatgaggagggcttggatagaaatgaggagattaagcgggctgccttccagataatctcccaagtgatctcagaagcaaccgaacaggtgctggccaccacggttggcaaggttgcaggtcgtgtgtgtcaggccagtcagctccaagggcagaaggaagagagctgtgtcccagttcaccagaaaactgtcttgggcccagacactgcggagcctgccacagcagaggcagctgttgccccgccggatgctggcctccccttgccaggcctaccagcagagggctcaccaccaccaaagacctacgtgagctgcctgaagagccttctgtccagccccaccaaggacagtaagccaaatatctctgcacaccacatctccctggcctcctgcctggcactgaccacccccagtgaagagttgccggaccgggcaggcatcctggtggaagatgccacctgtgtcacctgcatgtcagacagcagccaaagtgtccctttggtggcttctccaggacactgctcagattctttcagcacttcagggcttgaagactcttgcacagagaccagctcgagccccagggacaaggccatcaccccgccactgccagaaagtactgtgcccttcagcaatggggtgctgaagggggagttgtcagacttgggggctgaggatggatggaccatggatgcggaagcagatcattcaggaggtaggagggtctcgggttcgtttagaggatggggcgctcccagtatttcttggagaaaggctgccagtctgcctctcccttctgctacttgtgcagcaaagtcatagtgctcttcagctctttatcgcaacctgcagaggtctggacacggcgtagagctggtgggtaactgaggagttagattgccctgaaaccccaagtcatgggagctgtaacttggttcctcaaccggtgaccttccccagtgagcccttcccaaggaactagcgccaagttgggctcgctgattaacattagtgtgcctctttttctttgtttaaaaaaattattattattttggtgcagatggagtcttcctttgttgcccaggctggtctcgcactcctgggctcaagtgatccttccgccctcggcctcccagagtgctgggtttataggtgtgagtcactatgcccagcccatttttttttcttttttaaacactaacctctttgtgtgtgcgtgtgtgtgtgtgttttaatggagaggcctccttagctttacttcccttgagtgccaggtatgggtgtgagtgttttgaatggtttttatttccttttaatcatgtgcttgttcccatgtcttcacctgctttccttctccagaagctcttacagggtaagtgcccaaagaacggccacagctttgaatacttgtgggaggcttgagcttcctgagttgtcgctgtcacctttgcagaaagcctcagccattttctttctgtgcagttgcagctccacccccgggaaagcggggcactttgataacgaggtgtcctgggtttttcgagtgctgaccccagcgtagacagttcagaccgctaacttacaggtcagcagctcctgaccctgcttctgcaggcaccctggggtgttttcatttatctcatggagagaggccacgaatatcccgagtggctctctgacttgtttgtcctggagccattccctcccatttcagctccgggtaggttgggaatctttattgggaattttaccactttcagcagcatctagtttgtaccacacgctacattttgtcacctccaagatgctgttaagacactactgtttttatgtaccttggaaagaaaaaagtgctgccagtcatgattatagaaggcaagatactatatgatgcatcctaatctcgggatgtttaaatgtttcttaaaatactgcatctgaaaatgggtgatttttattttatttattttttaagaataaaggagtttccctttgcttactgcccctcagctgaattaacaagccccgcagccttgtctgccaactctagatggatagtagtagctactcagacctgttgaagtcttctgagtttaggcttgaacctaagccgtggtgatgggcagggaggtttagggatggcacgtggaaatgaggtaatactgtccacgagcatgcggtgggtgccaagcacgaggttagtgcctcgcatgtaccttcatgtcagccctgctttgtttgtgaggaagttgaagctgagaaggggaccagggaccaccccactgagggagctggaagctggcctttgagtgcagcctgctagagtccgggtgtggttctgagccactgctgggagccatcgggatggcaggtgttagccagtcccattctgtggggcagaggctggatactgtgagtgagcagagctccccgccccctcgcccagcccctgtcagcctgttatgcttcccgcaggctagccaagcagtcttcccccagaaggggtacttttccctgcatgaatcctgttcgaagcgcctagtgttaaggggggaagtcattttgaaggtgattcttccttagctgggagcaggatctcttgggccttagttctctgcatccagtgtatgggttacttggcaaaggattatactcagggtttggagaaaccatgtggaaggtaacctaattggtagactctcaggagtgatctatttctggtgattgagtcatccatatttaagccagggccacttctcttgagctgatctggacccgcttttttgtgacggtccctttggcacgctcttgagtgagagtggaacagcccaggtcgggagcagagtctgttcccattgggttttcttgggcatgagctttggctcagtcttttgaccaagggagtatttgagccagaagagtgttcagagttgcatgaatcaggcctaagcaaagggaaaggagactctccttttttagtccacatatggcagaggaacgagcgggtccccgctaggtataagaatggggccctcaggcaggccagtgaggactttgtctagctctgctgggctgaaggccagtacctatgaccctgggactgggccctggggacaggagactgacccttggtctgagggggtaggatagttggaagggtgtcaaggtgtttgtggtccatcggtctggctctcaggaccatgtggacctcaagcgtgtctcctcccccgccctctgggctccccttccctgggcgcagtctgtctcttccaagttcaccacttgtgtctctgctccagcagctgtggctgggtgcggctgccaattaagcaagtgggactgtaagtgacaggctaaaattaggtgtatcgacacccccagttctcctttcattggggttgttctgagccttctagactgtaagttgacagtcacctgccaagcttgaggagcgggtgtggggcagggcctcctgggaatgtgagtttgggaagttcttggttactggctgctctgagtggggtctgtgtgtgtgcgtgcctgctgcttcttcccctgcaggttctgacaggaacagcatggattccgtggatagctgttgcagtctcaagaagactgagagcttccaaaatgcccaggcaggctccaaccctaagaaggtcgacctcatcatctgggagatcgaggtgccaaaggtaggggcggagtcccccaggctggttctgtggtaagcccaaagctccctggggccagggccattagacctcagggagggagggggctgggagagggacagtaaaccagaaggagccctgggtcagccaaaggccgcagggaaaggacacgctacactttgccaaggctcagagagcttcctgcaacatggaattcctccagctgcctccaggagcatcttattcttgtacttctcaaactcgcaggcctgtgtgtctcccttgggggtggttcttgcatattctggggctcagatctatttggaaaaaaaacaccaaggccgtgggggccagccagaatcccttcactgagctctgctcaagtgctccaagtgtattttataattgagcaaagcataaatccatattttagagaacttgaaaagtatagaaatacatgcagaaaataaaaatcagctctaatcctacccttgagagtgactgtgaaagacttttatttccttctcatcttgcaccctgtggtttttaaacaaaactgagattatgtcgctttaattaatactttaaatatttaacaatttaattttcgtgtgttattctttgaaaatgtaactgtaactgcattattcactgtgtggatgtcagtttacttcatcagtcccccattcctgagtgcttaagtggtttcgagcttcttgctattagaacttacaacatattagcttgatcttgatgtttatctctggggctcagaaataatttgtcagaccgcattctcccagggccctgggctctgtgctcaggtggagacttggcttggtctgaactctgggtcagagtggctgttttgaccctgggttgcgaggtctcttggtggtttcctccctggggggccctgttatccgtcctgcctgcttttccttcagtggttacaaagggcatgaagagaaaggctgtgcctgaggatggaccatgtccccagtagctcctccgggagggggtcgttggcggttgtgtgggagcccatcttacgtaagggctaagtttggctgcttctatctgccttgaactctggcgcactgggcacttctgcatgcctcctgctctgcaggcttcagcctgctgtcacttggcagcgggagcccagggttcttagaccttcattttcaaatcgagcccctttatctttggatctgagtagacttgagggagaggggcacgagaaatcgagaaactgtgtgctggtgaaacttctcagcatggcttttagaggagaagatgctgctgcctttgcagctttccgggtctgggccacattgttgggatgaaatgggaactgcttggtcctggagccagactgcctggttcgacttcctggttagcagctgtgtgaccttaaggtagttacttagcctctctgggcttgtttccccatatacagaatggtgataaagttatctgtgtttcacaggtactatgagtaaatgtaagtgcttagaatagtcctggaaaataaatgctgacatggtaacagctaatatgtttgagcatgatcttgtgtaaaacagaagtaggtctttgggtgtccagggaattggtttccctttaaccctctcatctctttttgtctttctggaagcacttagtcggtcggctaattggcaagcaggggcgctatgtgagttttctgaagcaaacatctggtgccaagatctacatttcaaccctgccttacacccagagcgtccagatctgccacatagaaggtcagtaacatctgctgcttgtattgcctcttacctgaaatattaaatagaagtgaatagcatctgagtttcaattgctatctttttggaataggaaaccctgcttctcatcccagggaagggagcattaggtatcttccctgcagccttttccccatttcaggtgcctgcgggagactcaggtccctccctactctgatctttggccaggagaagtgtgggtgcttggttgggcggggcctgggtcctgggttcatagtgcccaccaccccataaaggcttctctcaaagcagaagtgccctgtgtgcaattcccccttggcattttcacagctgcctgcctcttctgttgcattgaaagcatggatcataatggcagaggtatcatttgaaaggcttagatgcctttcttcctaaagcagagcttaagtgttttgttacctcaaagatgcacttgaactctatgcaaagtccagtggagtggggtctgtggctgtgtttttgtgagtgtgggtgtgagtttcctcttacagtgattgtatgtcctgcccccatccgctatttaggctctcaacatcatgtagacaaagcgctgaacttgattgggaagaagttcaaagagctgaacctcaccaatatctacgctcccccattgccttcactggcactgccttctctgccgatgacatcctgggtgagcgtgctactgggtgatccggacttcttgccactttcccccaaacctaccccaaacaagaaactccccagacctcaggctaagaaggccaagtgcacatgagtgcctgcgccctctcttctctggcctctgctggtcggttctgctatgggactgtgttctggggacagggcttaggtggtgatagcgctggcaggaaaccagaggcctcttggtccccacatgggaggactacttttcctggctctccccctgggcaccttttaagttttctaggcgtttgcttagaaaggatggtgtagttcggacaggagattgggtgtgtccagggtcgccgttcaccacctgagacctgggtgggactagaatcatgggtttggatggcgcttgttctttcttctggttgagtcaggccttaacagtggccctggtgaaggatctccttccccttcccctccccaggaggtgcctaaattacaaagaagaatgaatactccccaccaggcccggaagtccagtgactcttgggaggttgccccaggagtttggcagagggaagagctgctatctccagggcccctgtgtgctgctgactgcagggtctctcagggccgtggcccatatcctgccgtgtgcctctggccctggttgggtcttatctcactgggagtagaattgcagaattctgtgggccaacgactgttgactacgttttacacagatggacagatgggctgactatagctccaaggaaattgtcctccttcgtgttttttttttgtttttttgtttttttatggatggtaggcatttcagttttgtgtcttcccctttgcaaaggcccttgggctggagggaaaggattgggatatctttttcctgtggatatgtgagagtaggctgaataccactttatgctttactcctgaatcaagagttttttcccaggaggctcggtcgtagactcactctcttttttttttttttttttttttttttgagacagagtctcactctgttgcccagtctggagtgtagtggcatgatcttggctcactgcaacctctgcccaccaggttcaaacgattatcctgccccagcctcctgagtagctgggattacaggtgtgctccaccatgcccagctaatttgtatgtttttagtagagatgggatttcaccatgtttgccaggctggtcttgaactcctgacctcaggagggtaagcagtaggagggagagcaaataggaagcagactctgctagaccttgaccatggacctgacctgaggccactgcttgctcttgggagggcagcgtagatgctgtcagaccataggctcctggggttgtctgccagtccacaggagttggctaaagggcctggggcctgcctactgcttattttcaggagtcttgttctcagcggccacctcattcctgtgttgccctccctgggtcttatagattcatcaacagaagtgggagggagggcactgctggtaggtggaccctgcccaggcctgtgcaaggcccagcactacctccgcagttgcttcttggttgcccagtgtctgtgggaccctccctgcctggccctgaggtgagactgcccctaatggctgctcgtggtattgcaggacaacagccacaggggtgtcgaacactttctgttgttaaagtagtccttcaacctctaccttctgggtgccatgttgtcttgagttgcccttttcaaagatatgctagcccagagacttgcccttgggtctcgggacttattcaaagatgagataagaaggattgtttcagtgaccgctcccccttcccctctacagctcatgctgcctgatggcatcaccgtggaggtcattgtggtcaaccaggtcaatgccgggcacctgttcgtgcagcagcacacacaccctaccttccacgcgctgcgcagcctcgaccagcagatgtacctctgttactctcagcctggaatccccaccttgcccaccccagtggaaagtaagcagtgccctgaggggtcgggaagggggacccctggggttgcctgttctgccctggatcctgatcaggaggaggctgttctgcgatccttcatggaagcagcatccttcaattcttgccattgttatggagctggggtgggtttcctggcaaggcagagctggggtttccactggctggcagagtgatgggtgttggagtagagttttgacacagggattcagatcccagctctgccactaatttttttttttaattttttcttttttttttccctcaaagccagtgtcatagtatctgccacctatttattatctgttaaagggggtgatacccacttgttccaggaattagtgttgaatactgtatgtattacatataaagcacttatgcatataatggttaccacaaaaaaatccccaagtccaacaagcctgtgcagcgtgttgggtcatctccatttaacagatgagaaaactgggcctcaggtgacttgcccaagtgagcaggatctggggtctgagcccagcctttgtcattattatctttgttgtccttatcacagaggatggaatgtcagaacatcacccattcctcaccaggggatggcagggtcactcagtgcagtagaaaaccttctgaagtgatctctgtagccttttgtgtggattttttccttttggaaggataaggacttagttttcattggcttctctaaagttgccttaacccagcagtaaagactgaactggagcctgaggggtaactgccaggggttctctccaagggtcaggacccagcacagtcagcctcatgtcacaggtcctcatcctggccagcgtgggcagctgttggggtgctgctgggaacgtttacctcctggtctcgtctgcctctgacccacagtgggttagtgactccttgatcctgggtggctgcccaggtgctgtcagcaccttccagaggcaaaggctagaagaagggggtttaggcccaggaggccccttctggtcaagctctccagctgagttgtgggctggagcacaccctaggtatgaggatgctgagatctgctgcacttgatttcttcagggactttcttttaaatgtaaggctggccctggcccccattccccgagtgctatatttacttggtttattcctattcatctgtgtccctcttgggtcccagaagttttggagtaatggatctagactgaatgcttctcagtctggatggcctcgggggcggcacacttgctaggctgaacttctcacatccaggtttttccctcggctggtcttgggcttgggggaggctttgcttggggccggttgctgttcctgtcccctgcactgtggaggttgcaggcctctgagaggtaacgcagggaggtgggtagtggccaggtggcccttggtgccctgccctggcccaggcgttccacgcactctgctccctaccctgcagtaacggtcatctgtgccgcccctggtgcggacggggcctggtggcgagcccaagtggttgcctcctacgaggagaccaacgaagtggagattcgatacgtggactacggcggatataagagggtgaaagtagacgtgctccggcaaatcaggtgagcggagatgcctcaggcaggcctacgccctgcttgttctgggatgcgtgatctctgcgtggctggctcagttgtgccagggcttgggtgagggttacttcttccctcctgctgcctactgtgttttagcagagtctgatagaaacaaactcgattactcgcttagccaaactgagctagaaggcctgtattgtggaagaatccccagcatcatccttcaaaagtgaagctgggccaggcgtggtggcctgctgcaaatcccagcgctttgggagggtcacttgagtgcaggagttcaagaccagaccgggcagtatagcgagacctcatctctacaacatcaacaaaaaaggaaaaaagtgaagcaggctcctttttaggaatttgtcataggaagtccctctgaggtcaggcttgcagcagggtcggctggctgtgtttgggtgtgctgtgagccgtggcctcctgcaaagtacgaaccctctgctttgctgcatcccaggttatgggcgtcactgtacaaagatgaatactggcttggagtggagtcagccttcatgtccacattaaacttgttcctttcttgccttcccaggtctgactttgtcaccctgccgtttcagggagcagaagtccttctggacagtgtgatgcccctgtcaggtaacagctgaggcctttggcttgggggattgttggggacagttgttgagagtaggtctttctcagagcctccgttctcacctggaggatttatgctaacataagttgctaccactcaagagtttctgactgaataggtctgggcttaggcccaggaacttacattgctatcaagttcccaggtgagaccagtgctgctgatcctttgagatccactgctctagactgtactcagacctcaggcatcaaggggcttccaacaaaggcactttccagattatagtccagacccagagtcttagccccggtggttgagggcgtgctggtcactgatactgctcagccaggccatagctccatagggcacagtggggacaccctatctggtgtcttagactatgaaagcattgtcagagggaagaggactggcaaaatcttgggtaaatgacttagcctcaattttcaccccagaacatgggaatggtacctgtctttgatgctggctgtgagaattacataaacctaagatctggtgtgtagagggtggcgaaatggcagctgtttatggctaggaattttatatttgtaggtgatagttcatcccatcccactccctccccaggtttgccccttctgatctccttcttgcttgtcttaagcgatttgcatgcgttagaaatactacagtctagctggagtcggcttagagggagcactggggcaagatctttgttttgcttcttttattgctgttgcccctccttcctctctgcttctgtccatctaagcgatctgtccagacccagctgaaactttctccttcgtaagattttcccggatcttccttggtaaacccctgtctctcccatccttgccactgcttgccttgggtatggtgttctatgtaacttttgtaatccagcaaagctgaatgctgccgcagcgccttgcccactctgagtggctggccttattgggctgtgtggccaactgcctgggtttgattcccaccttcaccacttgggagctggttgaccttcaggaatccacctttgcctcagtgttctctcctgtaaagtggggatagcacttggtgttactaattttgtggaagaacacatatgctctgcactgccagcatccgagttggtgggggtgggggtggtgctgctgctggtggtattggtggtggtgttagtggtgaagtttctgtccatctgttgtctgtgctgcaccagtgggcaacatgcagtagcggcccttagtttatccactgggagtcatatggaggcctaggctctgtctctgacctgggtggatctccccagtgcagttctcaagttccacagcatctgaagcattctacttggaatgcacctgaaacttgtgtacatgacaagggtgccttgcctcagtgagagcctaaatgccgcttttccttttcctcctgaagacgatgaccagttttcaccggaagcagatgccgccatgagcgagatgacggggaatacagcactgcttgctcaggtgtgtggttggcaggggtgggggaggcaggctggctgggttcttgggaactgacctttcaatgccttctttcctgtggcttggccctggattgaccagcagtatttaaggaaaggtgcatgaagtagctaatacttgatattagtctgttctcacattgctgtaaagaaatacctgggactgaataatctataaaggaaagaggtgtaattgactcacaattctgcgggcctggggagacctcaggaaacttacaatcatggcagaaagggaagaggcacgtcttacatgatgggcaggcaagagacagtatgtgaaggaggaactgtcagatacttataaaaccatcagatctcatgagaactcactatgacgagaacagcatgggcacaccgcctcatgatccaatcacctcccaccaggtctctccctcgacacatggggattatggagatgacaattcaagatgatatttgagtggggacacaaaacctaaccatattattctttccaccccccttcttcaggtgacaagttacagtccaactggtcttcctctgattcagctgtggagtgtggttggagatgaagtaagttctgcccttcttttccttctgtgttgctggcccgaagtaatggattgattaggagctggtcctgggatttgtttcctcttgagttaatcagaggatataactgtagacaagcacctcctagggaacactttggatgtcctgattggcagtggtgatgtcagtgtcctctagtgggtagaggccaaggatgccactaaacatcccatagtattcaggacagccccccacagcaaataattatccaaccgcaaatgtcaatagcgccaaggtggagaaaccctgtgcgagactttctgggaccttctgtctgttgagtttttctgtcctctatcttatggtatgaaagcttagatttcttcagcatattaaaaagcctatcctggccaggtacagtggctcacccctgtaatcccagcactttgggaggccgagacgggcagatcacttgaggtcaggagtttgagaccagcctggccaacatggcgaaacccccatctctactaaaaatgcaaaaatctgctgggtgtggtgatgcacacctgtgatcccagctgcttgggaggctgaggcaggagaatcacttgaacctgggagacggaggttgcagtgaaccaacattgtgccactgcactccagcctgggtgacagagcaagactctgtctcaaaaaacaaaaacaaaaacaaaaaaaccctatccttatgccacagcagccaacagaatacttaaataaatgttcctgttggctagagcataagccatgtcccccaccctgttactcttttttttttttttttttttgagacagtcttgctcttgttatccaggctggagtgcagtggcgtgatcttggctcactgtaacctccgcctccggggttcaagcgattctgcttcagcctcagtaactgggattacaggtgcctgccaccacacctggctaatttttgtatgtttaatagagacggggtttcaccatgttggccaggctggtctcgaactcctgacctcaggtgatccacctgcctcagcctcccaaaatgctaggattacaggcatgagccactgcgtctggcctacactgttactctcatacatctgttgcctgcagtggcaaccggggaggggagaactcatgttggctagggagatggccccaggatgccatggacaaaagctttaagggaactttcttttctaggtggtgttgataaaccggtccctggtggagcgaggccttgcccagtgggtagacagctactacacaagcctttgacccccatgctgcttcctgagagtctttttttgcactgttgaaattgggcttggcactcaagtcaaagatgaacatcggaataacaaacattgtcctctccagaaagtcctttctttctccatactgtagtcctattgagaagacatttcgtctctgagaaaaaaggatggaactatgggttctcttcgcaaagccaaaggatagtgtttaacaagccagctggcttatgctggttctcagctgtttaaaaaaaaaaaaaaaaaggaatagaaacagtttcaaccagattgtcctattccccctgttccattcccctcttcttccttctatctccttccccggcaaaaaccaaacaaactggcagacaggccagggatgtatgttgcttgcttgagagggtttcttttacttcaaaatctttcttcagggagcaagacatgaactgactaattggtatccactacttgtacagcttacataaatgagttgatgatatttaaccagtttttataaacttcatttaggtctctaaacacagactttttaaattgcaactgtaaatatgaaatggtcatcacatctgaccttggtcagtggggaggggaactggtatcctgccaagcctggttgtaatttgtaaccattttctatttgtgcaaactctgtaaatatgtgtttaaacaaatgtaatattttgtacaagatacactggagaacaaagggaactcaagattcttccagccacatgtcacctgtaggtagaagtaaactctgcagtgcagcttctgctcttggcccctctggccagggcccctgtggcttcctgcacactggacaggtgactgtatggtagagactgtgatctgggaactttttgctgtacaaatctgtttaaaaaaaaaaaaaagtaactcattgaattaacttgcagtggtgtgtttgattcttttttagactggcttcagcattgtgcagtttaaaaataagtaagtaacttacataaatcttcaattgtatgaactgcagctttgagtccatttttttccagtggtgaagaattggcggggggggggtggtgagtgtggcgagctggatcacaggccccacacaactgcctctgcaggagacccatggttttttgaagacaatttggccagaaatttctatctggccttttcctctctctccttgtcccaccaggtggcagccaagcgtcctccgacttcttcactgcatgttaactggccagactcagtttaaagcactggcttccaaaacgggttgtgccttctttggttgtcattcttaatagattcgtgaagttatttaatttactgtagtgataagaatgatgtaaaaaatacatgtaagttatgggatgagatactgcctcaatttaatagcccctgctcttaaagaaggctggccactgcagcccaggcctaccccagtgccccgcccctgccccctacgtttgaggcctctggctgcagggctgttgagcttgagctctagtttttagagagctgacgtagcctgagggtcattctgattggagatatcctcccaccgcacacccactcctgggagctcctcccagttccaacccagctggcttgttctttccgtctctgtcctggccaagcctgagctgtggccattgtcaggtgcccatcttcccctccatccaggttctcgcctgtgtggttaacagcctctgtttccctcatctgtaagatgagataacctcataaggcaatttaatcatggaaatgccctctgcttctacagtgcttggtcccagggagctcccctgcagttccttagccactattggctttaagtcctggcaggaattgggtgtgactttggccaggtcaccatacacccaggtctaagcttttcctctataatccagcattgctggagcatgaaaaggtctacggaagccttccgactaacttagggaatgctcacagagcctggtgtgcagatttagcttttatctccagggaaccattgaggggtttcaaacattaaaacatgcttctggtgcagggagaagggtgggtgaggtggaggtgtagacatgagaaaaaagggattcccctgggatggagcctgggacagacaagacgtgatgaagtcaggatcctcagataaagccccttgggctttgatgagtgggatgggctgctacccgggactcccacgccttagagtcctaccctgcaagggtgcctccattaaactcggtttggaatgctggaggaagagcaagttggaggctggtgaaggacttgtactcctcgaataaatgcttctcagattgttgcctttgattaatttccagagttctgaaaaacttgacttttaaccattttgccagaaatctcattgttcttaaggaggagcagatttatgaaggtcctcgctccatccctctgcaagtcagctgcccgggcaagtgcatttgagacgccctcttttaattacctgtggggcatccaggggatgtcttggtgtgaattggaaactcacgggagaagccagtgctggcaagagatctggcaatctgcccagggtgtaggggagaggggtggaatgctggatgcaggaggctagagcttccaccctgttctcattataggcattggtgtcagtactgcccctctggtctctggggcatcaccatggaggctgggttttagggttactgctataccttgtacaacttcaggtatgccacttgtagacatcaacatctgtcagacgataactaatgtcagttctaagataaaatgagagttgtagctagagttagggagtgcttactgtgtcaggtgctgtctcttttacaggtaacactgagtccttgacacaacccagggaggcagggactccgtagatgagcagacccaagaggtagaagatggtgattttggaaagtggttcgtggatagagcagagctgaaactaaaaaccaggctgctaccccaggccaggtgctcttcaccaccacccctaaagcagcgtggattcatcttgccccagtccacatccccaaataaatgccacagtgattaaatgatcagtccatggaaaagctttggaacttagagtgggaaagataccatgacaagagagatcaatgattttgcttttatggaaaatttaaatcttaagtaacataaagccaagagacacctgcagcagctagggccagagagtggacgttttgaatccgtgataacgtaaaacaaggaaaactggccaggcacggtggatcgcgcctgtaatcccagcatttcaggaggctgaattgggtggatcacttgaggccaggagttcgagaccagccaggccaacatagcaaaaaccccatctctacaagaaaaatgacatggtggcacgcacctgtaatcccagctacttgggaagctgagacaggagaatcgctggaacctagaaggcggaggttgcagtgagctgagatcacaccactggactccagcctgggtgacagagccagactgtctcaaaaaatcaaaacaaagaaaaaacccaagacaaatctctaagtttccattgggaaatatcataaaggatgtggatggaaaatctgggtctgttcctagaccagcagtggccaatagaaatatgtgagccacatctgtaatttaaaactttctaggagccacagttaaaaagtgcaaagaaacagatgaaattaattttcataatactttaagtcatatcatttcagcatgtaatggatatgaaacattaaggagttgttttacagtgtttttcctactaagtccagtgtgcatttgacacttcagcatatctctgttcaggccggccacatttcaagggcatgatagccacgtgtggcttgtggctatcacgttggacagtgtaggcctggactattccattgatcactatcacactgatactgacagccttatttatgttcttccttattcaaaaagttgtatgtccttttgcacatttatttttccagatgaactttagaatcattttgcagggaagggggccatactaaatattctattggtatttgaaaataatgcacgctattgagttggtataaagttttatataatctatgaagttgggtgtgtaaaatatttgaatttattgttttcctttctcgccctctccttccctggttttttttttttttttaaatacagggtctcgatctgctgcccagactggagtgcagtggtgcagtcagctcattgcagcctcgaactccctgactcaagcaatcctccctcctcagcctcctgagcagctgggagcacaggcgcatgccaccacaccgaactaatttgttttttcattgtttttgtagagatgaggtcttgccatgttgcccaggctggtcttgatctcctggcctcaagcgatctccgctgcctcagcccccaaagtgctgggattacagacacaagacactgcacccagccctgaaattgttgtcagagcatgtatgagaccttgtacatcaacatatttttttgtagtttggctgggcatctctggtagactggatgtctccttgccaaaaattctgtcttcctcacggtaggattgtacatcctactgtgttttgttggactcaggcatggactcatcctggtcagtggaagatgggtaaaggtggcacaagtcaccaaggcagatgccttgagccagtatgtggttcgcttgtcttctccctctgcaccagcgtcagctacatgccaggtagatacccatccacccacctgggtcccagtgtgaagataacgtggaacagggctgcagccagctctcaatgggtgtgtggtttgtgaaacatctcacatgagcctctgaggtttggggcttgtgtgttccccatggcctgtcattctagggtcccacacctttcctccaagggctcagagctctggccatagaagctgccagggtaccatgttcttatgcctgactggggacaagctcctcgccctctcttctcataaccccctctgtaaacagtgggggtgaattaggtgagtgctgacatgcttgccaggtttgacttttgactgatctgtgaataagagccttcctgaagattcctcttaatgaggctgacttgtatttttacaaagcaaatcatctaagagagatcttggctgtttcttgttagaaataggcccaactgacatctggtggggacagacggtatttgagaagccctgatgctctgggcaaggaaggcggatacctcctacctggagctgggatggatttcttgtctttcaccagcctccctggcttggtgacaggcaggagctctgactgctcccactgatttctttctctccattgagcacctgctgtatgccaagcatcctgctgggggcttcaaagatgaaacaaacattgagcctttagggagcttctctgttttgggagtggggtttgatgatctcggtgcagatggtgctttcctgagtgggtgccttctcccactttgtaatgggatcctggcaattgctggtgaggtaggaaggaaactgaggcttcaaatcagcagagccagacttgaaccgggtcttctgcactccagactctgtctttgcttgcatgtgatgcctctgcttctctttatgatggcccgagcaccaaagggacatgttgacaagaaggatgaatgaggcgacaggtgggagggctcctctccagagctggcctcgtccaggctttgaaggaagaggaagccgaacagagtggcatggcaggtgagggagaagctgcatggccagggtcattgccatgatgggaggcacttcctgctgagattggggctggtcctgtgatctggctcatggacacttggaaaaggagatggtaaaagagcaggggctgggcacgatggctcacacttacaatcccagcactttgggaggtcggggtggaaggatcacttgagcccaggagttggagaccagcctgggcaacatagtgaaaccccatctctactaaaaatacaaaaattagccaggtgtggtggtgcacgcctgtagtcccagctacttgggagactgaggcaagaggtggaggctgtagttgagccatgattgcaccactgcactccggcctggacaataaagtgagaccctgtctctaaaaaataaaaataaagtgagaggatgacatcatcacaggaagctgtctgtgaaaacatcacttatagaagtcctgtctttttcatcttttaataggtaataaacacataatacatgattccaaagatacttaaggataaccagaaaaaaggaaatcttcctgtttcccccagacacccagattttctctctggaggacactatatctagtttcttgtgtttcttaccagaggttcaatccctgcacacccagcacacatagatgatagcataacataaacagggtcacacactaggccggggtttgtcaataaagttttattggaacaggcatgaccatttgtttacgtattgcctgtggctgtgtttgtgctacagccacagaggtgagtacctacaatagactggatgccctgcaaagccaaaaatatctagtttttcacagaaagtttgctggcccctgctggaaacactcgtgtgcaattcctaacccccaccaccctccatttaatcaaacttaaatgcagctttgatatttatttgcctcttttccaaccatgagtttttttggtctgttttttttttgagacagagtctcgctctgtcacccaggctggagtgcagtggcaccatcccggctcactgcaacctccacctcctgggttcacgcaattctcctgcctcagccttgtgagtagctgggattacaggtgtgcaccaccatacccagctaatttttgtatttttagtagagatggggtttcactatgttgcccaggctggtctcgaactcctgagctcaagcagtccacccacctctgcctcccaaagtgctgggattagaggcatgagccacagtgccgggccaaccatgagttctttagattttgaaaattgcagactctcagcttccttgtgatgatagtaggcagctctgtgccttgtagacctccttcctggtacctgccttgttcctggtagagtgatcaggcacagaaccctccacccccagagggtgggcagtcttctcaggatagactgggaagaccctctttagacagcagtgtggtccaggaacctgcagcgctggcagctcctgggagcagaatctcaggctccaccctcctgaatcctcatttttgtgactcccaggctattcatacattcatcaaagtttgaacacttgatgagcccagggcatggatgttcaaccctggctgcatattggaatcattctgaaaactactgatgccttcgcaggacatgcttaagttatggctaaaaaaacaacaacaacaacaaaaaacgtttaaatgacttgatgccagagacctgttttcaaagacacggatttaattggtctgggctacaccctgggcactgggagagatttagaaaaagtattacctttggagtgtaacgtgtacaccaaagcacaccaagtgcacacatcttgagtgtagatcatgatgcattttcacaaacttgtgcatctgggtaaccatcaccagaggaagttaaaggaacatttctaggatcccaggagttgacctcatgcccttgtttagtcaataccttgtcccctagggaactgtaattttatcgctgtaagattaattttccgccgggcgcggtggctcacgcctgtaatcccagcactttgggagaccgaggagggtggatcacgaggtcaggagatcgagaccatcctggctaacacggtgaaaccccgtctctactaaaaatacaaaaaattagccgggcgtggtggcgggcacctgtagtcccagctactcgggaggctgaggcaggagaatggcgtgaacccaggaggcggagcttacagtgagcggagatcgcgccaccgcactccagcctggatgacagagcgagactccgtctcaaaaaaaaataaataaataaataaaatgttaattttcctactctggaacttcgtgttaatgggatgatgcagtctgcactcttgcatcttagtgtttgcactcaccgttttgcctgagatggcacgtacctcagctctcttgtgtgcatcccactgtatgaatatactacaatttatttacccattctttgatgttcattgaggtttctggttttaggctgtaatgcataaagctcctatccttcatttttgtatttttagtggatgcatgtattcatttctcttgggcacacacctgtgagggtcacacaccacagagcaggaacatgtttagctccagtaattatttgtgtcttgggatttttttttgtttttttgagacaggatctctgttgcccaggctggagtgcagtggcacaattttggctcactgcaacctctgcctcctgggcccaagggatcctcctacctcagtctcccaagtagctggaactacaggctcgtgtcaccatgcctggctaattttcgtatttattgtagagatggggtttcaccatgttgcccagactggtctaggactcctggactcaagcagtcctcctgcctcaaccccctaaagtgctgggattataagcaggagccacctcgcccatctatgtatttggattgttaaagctcaccaggtgattctgatttgctgctggaatcaagaatccctgttcccagctgggcacagtggctcaagcctgtaatcccagcactttgggaggcttaggtgggcagatcacctgaggtcaggagttcaagaccaccctggccaacatggtaaaaccctgtctctactaaaagtacaaaaattagccaggcatggtggcaggtgccgataatctcagctacttgagaagctgaggcaggagaatagcttgaactcggagggtggaggttgcggtgagctgagatcgcaccacttcactccagcctgggtgaaagagtgaaactccatctcaaaaaaaaaaaaaaaaaaaaaaatccttgctctagagagatggctgtcaactcatgctgccaagtgctgctctgagggcagtggttgagctcttccagcagccgttctgtgagtttcctcagtagccttccaataaatccctaatccatttctgttgcttgccaccaatgagccctatccaaccagacacacagttccagtacaactcccacccggccctccggttcagtgtttacatctcttcctattatcactgttgattggatttcagtctcaacctcctgtctcccctgccagagccctcaatatctgctgccgcctagctcagactcttgacaaaattctttcttctgtgttctccgggtcattttgaatacggccatctgaatatatgaacgtggtagtgggagtcggagattcacaacaccctctctatcttgagactactaacatagggttgatgtgaggctgaaatggcctagagcatgtaaagctcttaccacaaggcctggcatatagaaattactcaataaatgatgcctgaatgcaggtgacttccatcgtcacagaaagttttaatggactgcattccactatccaatagggtagccattggccatctggggctattgagcatttgaaccgtgacttgtctgaattgagaagtgttataaatataaaatatacaccttataagaaaaataataattacacattgaaatattattttggacattgcgggttaaataaaacatagttacactttttttttctttttttgagacagagtctcactctgtcacccaggctggagtgcagtggcgcgatctcagctcactgcaagctctacctcccgggttcacgccattctcctgcctcagcatcctgagtagctgggactacaagtgcccgccaccacacccggctaattttttttttttttgtatttttagtagagacggagtttcaccggttacacttgtttttttaaagggtggctagtggacatgctaagatcacatgtgtgcctcttagtcctgttggacagcatggggtggaggaacatcattataggaggtcataccctttcagacagtgtttctcaaatgagggagctcaggccattagcctcagtttacctggagtgcttgttaaaaaaagcaaagtgctgggacctggactctacattttcaataagcctcccaggctaaactcatgcccactgctcctataactagggaccatttgattttactcataaacaggcatgctcccttgctttaggttgtgaattgatggaatccttgtttcctacgttgacttggctgctaggaagtgttcgggactaagtttttggttaagttagggtttaattattgtgtaatctgggtggctgtgttgctgtcttccaatgtcttgccttaggctggaagtatcccgaggacaaataccaaagtctatttgcacagttgaaagtttctcgccttaaaacagccgtcttccagtctcagttctgtcgctgtgggactttgggcaggacacagtctgtaaagatcccattctcttgtggttgttcagagtatgaaaagtgatcatttatcttcaataaaacacttacttaaaaaaatagagatgataaaggtgaaggcgcttggagagggctagatttcagggttactcaatgcacacagcacagattgctgccactgtgtcttagaccactagatggcgccacagcacaagctactggaagtgtcctccccgccttccacctccccccacccccaccccgcacccagtagttagaacagccgtcctccaagcgatcttattattagaacttaatagaaacgcacattctcaggtcctcccccagacctcctgaatccaaactcttttaacacactgtcctgatgcacacttaagtttgaaaatcacggtcctagaatcagcctctgggtaacttgggaagaagtgagcaggaagcggtgaaatagagggtgggccggctgcagggggtgagggtgggtgtgctggagcgggtgaggatgggccggctggagggggtgagggtgggtgtgctggagggggtgaggatgggccggctggagggggtgagggtgggtgtgctggagggggtgagggtgggtgtgctggagggggtgagggtgggtgtgttggagggggtgagggtgggtgtgttggagggggtgagggtgggtgtgttggagggggtgagggtgggcgtgctggagggggtgagggtgggtgtgctggagcgggtgaggatgggccggctggagggggtgagggtgggtgtgctggagggggtgaggatgggccggctggagggggtgagggtgggcgtgctggagcgggtgaggatgggccggctggagggggtgagggtgggcgtgctggagggggtgagggtgggtgtgctggagggggtgagggtgggcgtgctggagggggtgagggtgggcgtgctggagcgggtgaggatgggccggctggagggggtgagggtgggtgtgctggagcgggtgaggatgggccggctggagggggtgagggtgggcgtgctggagggggtgagggtgggtgtgctggagggggtgagggtgggtgtgttggagggggtgagggtgggtgtgttggagggggtgagggtgggtgtgttggagggggtgagggtgggtgggctggagggggtgagggtgggtgtgctggagcgggtgaggatgggctggctggagggggtgagggtgggcgtgctggagggggtgagggtgggcgtgctggagggggtgagggtgggtgtgttggagggggtgagggtgggtgtgctggagggggtgagggtgggtgtgctggagggggtgagggtgggtgtgttggagggggtgagggtgggtgtgttggagggggtgagggtgggcgggctggagggggtgagggtgggtgtgctggagcgggtgaggatgggctggctggagggggtgagggtgggcgtgctggagggggtgagggtgggcgggctggagggggtgagggtgggtgtgttggagggggtgagggtgggtgtgttggagggggtgagggtgggtgtgctggagggggtgagggtgggtgtgctgcagggggtgagggtgggccggctggagggggtgagggtgggtgggctggagggggtgagggtgggccggctggagggggtgagggagggtgggctggagggggtgagggagggtggactgaggaagggctgctgagtgaaggtcacagtgcaagaacaattccacagcgcttgtcccaatcagggaacctttaaggaacaagatatcggatggcaattttgtattttcctttttaggtaagacatatccaatgctgtcagctggatagagggaaaggaggggttactaggggacccacaacttaggggcaaggtcttggaccaggagcagaaacacaggggctggctgagtgctgcagggagccctcagccaacctgtgtccccactctggctgcttgtctctgcctgttgagatttcaccaaactaccactgtgttaatggactagaatcttgcaaccctctctagatgacccaggaaaatggatgctcagaaatcaaaaagaagcttgagactgcatggaaaaatcactagtgaattaaaatcttatttctgtttttttcaatcctgtctgtttcctaagaaaaagctggtgccggaatgaacgcgtatctttttgttgttgttttgacactgacaaaaattccttttgcagatggctactgaggcttcaaaggggcaatgtatcatgcaaataatttttttcagctatgacgtgtacagttcagtttgatttatttttgatgtcagaaacaaaatggaaagttagcgctttaaaaatgagcatggctggctgaataaataaataatatgctcttggccagaatctgccagtgcctccttaattgtccattgattctttaattctctgcactttaacatctacggaaattaagaggccacagagcatggagatgtcttttgttaaacaaattaaggaaactgggttttagaaggtttagttcttcctcgggctttgacctagcatttaaaggcgggaagcaaagttgcccagtgaaagccagttgccctccgtggtttcttctggagcatgactgtactctcaccttgtttttccagccatgaatatttatagcgtgtcctcaggccacgtacatatagaacatggtgtgactcagagagcaacggagaccctgagcatccctcctgtcaattactgggaggtatggaggtggcctggtgtggcttccctccggaagatgctggttcccatgttttagatcctggcagaccagccccaggatacccagcaagggtcctgggaagtctcctccatttcttgcagggagagaaacactctggaatctttgtttcttttctttcttttttcctttccttccttccctcccttcccttctgcttccccttccccttccttcctccctccctccctctctctttttctgtttctttcttttctttcttctttttttttgacagagtctcgctctgttgcccaggctggagttcagtggtgtgatctcagctcactgcaacctccgcctcccggtttcaagcaattctcctgcctcagcctcccaagtagcttggattacaggtgtgtgccaccatgtccggctaatttttgtatttttagtagagatggggtttcaccatgttggccaggctggtcttaaactactaacctcaagtgatccacccaccttggcctcccaaagtgctgcgattacaggtgtcagccactgcgcctggcctggaatctttcttttatccccatttccagctggatcagaggcaccagccattcttagtgcccccaacagaggcttccaataccatccagaaaggctcccagaaccccatggccaccagagcctcctggctcaccaagccccacttccagtcttctaaactgcagaaagtctgcgttctctccccacctccaccccctgcctttcccctaacactgcactctgaggctcccttctccagaaagaatttctgaaccctcaccctggcctccccccaggtgtggaatggcggcccctcagttcccatggcctgctgtgattcagctgctggtactgtgggcccctccagagcagggcgtagttttttattatgtaaccccagcatataaaacaggacccagaacatcatctgctctcaaaaatattttgtcgaatgaataaacaagtaagtccatttcccccaagcaaatactatagatagaggtgcatttaacagagggtgagatgcccaaagggaattccatgactgcatccttgtcttgtgtgttccagcatctcaggcccctttgaaagggccttccttatattccctctaagcaccccactttggggtcaggtaaggtctgatgagaaaatgggtgcggaatacccagtgagcagctcacaccagtggcagggaacctcctctgcaccttgtgactcgtggaaggttttggacaggtggtgccatcttagcctctggtggatgcagactaggcctgtcaggatacttgtgagtgatatgaagaaaaagccggatcctgccaggctttagacccttgaaccttagatctctgaccacatcaatgtgtcactaaggctgaaacctcccaacctgcaaaggcaaatgtacatgcctggacagttctgggttggctgtgccagttaagagctgtgtgatcttcgggaagttactccacttctctgggcctcagtttgctcctctataaactagggtcaataatagtgccgcctcaaaaggtgattgtaggacttaaacatgaagccctggcatccaggttgcactcaatctatattttattatttatgtcccttagctgcggcctgaagacaagatctgctgaatgcttctctgtagaaatctcaagcaggccagctgtgtctgcttctatgcgttcttccagagtcgcggctaccccatctctctaggtccataggggcccgtcatttcccccacgctggagacccagttgccagtcctccctccactttcccctggaaccgccatgggatgctccttggctgtaattatggccccagggtgcagctgccatcagaacacctgctgcccaggccctgctctcagggtgcgaagctgggatcccccgttcaggcacaaagacctcagctggctgccttagggacccctcacctgcctctccgctctgagtcctcatttccctctccatcagcatcattacattagaattctcgcccttccacttatcaaatcagcatcgtgcctgtctgtctccgccactgtcaacaacgcagcttcttgtgtctcttgcaaccgggcgtctgggccgcccctctctctctggcaattatgattccttccccagctcacatggaaagtctttgttcttctccctgaacgttcaagttaatttccactgactgtttattcagcctttgtactggctggcttgctactcgctcaggaaaggcaggcctttgaggcagagtgggaaggcagagcaacagtttgggacaggaaggaaagacacttcagagagtgagggggcgaggcaggagtcctgagggccccggaacgtgggcgtggggaggggaggagggaacccaagaggggtagcctgccaattcccaggttctgcttttcgggttagcatcttggggtatttcttccccgtgtaagcgtgcgtgcagatgcacgtggctacgaaggcgcgtagagtcacaaacctacagatgcgggaggcagaaaaaaatagctcttggcagttgcagctatctctctgtgggccttctgttctgccgagcatctgagagtttgggaggaggttctggaccagcagaattgcgctgctctgaaaagggaagaatttgggggcagagaagaacctgatcccacagggaggaacaaagaggagagaggggactggaaggggagatggggagggagggaaggctggggtggcgtggccgcaggggaggaagtcccggccagggcggcctgaggaataccacgcgcccttttaaggtgtttgccctgtggtgccgattcggtttcgggtagcagccttgtatttgaggtgcttggagatggggctgggggtgaggtggtgtcgggccaggaaacgaggagggaaaggaagagatgtctcatttatgaatgcttaaccagagtggagataaagccacagccaggagacccagggctgagcaggatttgggggaggctggaagtctagaaactcagctctctggaatttggagaaattttggagatagttttggactgtggaaatagaaatgggcggtctaatcaatgctacccaccttatggggccaggagaccccagctgacatctgggattctctatataaacacagctctccagtattttcataatctaaaaatgcatacaagcaattatatgtaacacacaacataagacatttataaatctatgaaatcatatgaaaatataaatgagaaaatcaaatatatttaatataaatacacgtataaatatacgttttagtatgtaatcatatatatatacataaaatgtagaatacataatcatatttttaatatatgtaatataaataatatcttggaacacaaaataaagtcacatcttttactttccccgttctgaccacctctaacttgtatttgaagtgtataggccatttacattttttaactttattgatgtataattagaataaaataaactgtacgtctttaaagtatgcaactttaaaagttttttgttttttgagacagagtctcactgtgtcacgtagggtggagtgcagtggcgcaatctcggctcactgtgacttctgtctcccgggttcaagtgattctgctgcctcagcctccagagtagctgggattacaggtgcccgccaccatgcccggctaattttttgtatttttagtagagatggggtttcaccatgttggctaggctggtcttgaactcctgacctcaagttatccacccgccttggcctcccaaaatgctggaattacgggtgtgagacaccacgcccggccatacaactttataagttttgacctatgtacacatctgtgaactcatcaccacaatcaagataatgaacatatccatcaccccccaagtttacttttttctaggtagtcctttctgcccctccctcccatcccccagacaaccaacaatctgctttacatcactggagattcgtttgcattttctggaattttaaataaatggaatcaggcgtatgattctacttggcttctttcacccggcatcactttttgagacttattcatttgctttgtgtatcaatagttctttcctttttactgctgagttccactgaatggttgtaccacagtttgttaatccagccacctgctgaaggacatttgggtttaacatttaaatgaaaatgcctcccacatcccatatcatgaattgtaagaagttcctctcttttcctgagtttctcctcatttctggagtgctccaagagctgcagggttaatttctccctgggccagtaagttcaggacctgctgccagcacaggtaagctgctcagtctcctgctctgggccaggctcctcactgctctgccccatcggcccctcacagggcagcgtgggcataggaggcaggctcacaccgtgcctcagggagctggtcaggagcccaggcaagccctgctctcagctcgctccaagcagacacagctgtgcctctccactcggtcagggcacattctgggcctccccaggggtacacacgtgcacacatggccacactcccctggaagcgagcactgcaaagtctcagcctctgctggggccgcacaagcctcccagctgtttcaaggaggctcttctcactgcagtctcccatgtttccatccccgcctcctgactagtctctccctctccttcaatccccttcatccacactggccctttgctgttcctcaagcacacaggtgtactcctgccccagcacttttgcacgtgcccttccctctgcccagaatgcttttccctcaggtgagtactccttcatttccttcaggcctttactcaaaagtcgccttctcgaggaagcctgctgtggccaccttatacctaaaatttcagccgggcacggtggctcatgcctgtaattccagtgctttgggaggctgaggtgagtggatcacttgagcccaggacttcaagaccagcctgggcaacatagcaagacccctgtctctccaaaaaaaaaaaaaaaattagctgggcatggtggttgagtcgggaggatcgcttgagccccagagatcgaggctgcagtgagctatgatcacaccactgcactccagcctgggcgacggagtgaaaccctgactctaaaattacattacataaagtaaaatttcaccccaccaccctttaattttccctttcccaggctgacttttctctttggcaggagtcaccattgcacggcatagtttacttctctcttgtttatcattgtctcccccattggactgtaagctctctgagggcagtaagtagtctgctttgttcatcacaattccccacccctagagggcctggcacatagtaggtgcttaaatacttgtcaaaagaatgagtggataaatggacatttgtttcacgttcattctattggaaaagagagtccccatccctccaggatgaatagccaagggcgatttcaatctgaacaggatgtgtaatttccatactgagagatgagcacatttagctcacttagtaagtcctgatgcaacctgatcctgtgctgacaccgaatcacacggctgtcagagtctccccaggccttaaggaacagcgcctctagttgtttgcaaacttaaaaaaaaaaggtacagtggatcccctctttttttcctcaaagaaatctttctggaatttcattatacaaaacatataacattgatgttttgttagcatgaaactacatgcacacatttataatatttacttattaaataaggacatcgagattgatgaaaatacaaagttgaccacgtgcaatgtgatatattggattggatcctggaacagaaaaacgacatcagtggaaaaacaagtgaaatctgaataaaatctagagttcacttcaaagtgacataccgctgttggtttcttagttttgataaatggtaatggatgtgggtaatattaggaaaaagtgaaagtggggtaggggtatttaggaactgttggtgctatctttacaagttttctgtgaatataaaattattcccaaaaagtttattatttatttattttgagacagagtcccactctgtcgcccaggctggagtgcagtggcataatcttggctcactgcaacctccgcctcccgggttcaagtgattctcttgcctcagcctcccaagtagctgggattatatatgtgtgtcaccacgcccggctaatttttttgtatttttagtagagacggtgtttcgccatgttggccaggctggtcttgaactcctgacctcaggtgatccacccacttcagcctcccaaaagtgctgggattataggtgtgagctaccttgcctggcctaaagagaaagtgtatttaacaaatgtatattgcatccctggaggtttagtggttaggatgtggtgcctctctcaccggtgcagcccaagtttgtttcctggtcagggaaaaaaaaaatatttcttattgcattagtaaatagatttaacaaacaaaaaatacaaatttgaaattacggttatggatgacaattagcatcttccacaacatataaattattgccatgttttgctttggtgatacaatattgaaaaaatcttgactctcccagctaagcagtccaaaatggcaacagattttgacagctgctcgccttgcggtcgtaggatatgcaccaattaaactgagaaggcgagagaggctcatttcgagttctctagaagaatggggaaagcagatagtccacatgagtgcagcgctggtctgcaaggggttatcattttgaacaaagcacattagaatatgcacgttgttgcctctagttttaaaatagttttaaatatttttgaaagatgatgtttagattaaacgtttgcagaccctgtgaagcatcgctaggactttggcaaacacaatctgaaaaccactggtctcatcctcagttcccattttacagataagaaaactggggcctggaggccaggtgcagtggctcacgcctgtaatcccagcactttgggaggccgaatgggggtggattgcttgaggtcaggagttcaagaccagcctgaccaaaatgataaaaccccatctctactaaaaatacaaaaattagccgggcatggtggcgcatgcctgtgatcccagctactcgggaggctgaggcaagagaattgcttgaactcaggaggcacaggttgcaatgagccgagatcatgccactgcactccagcctgggtaacagagcaagactctgtctcaaaaaaaaaaaaaaagaaaaaaagaaaaagaaagaaagaaaactggggcctggagaggataaaggactgagtgttcgcaagcagaggataagcccatggtggtcatatttccaccatgagattcatttctatggatggatttaactggctatttttcctaaatgctcggatagaaagccattgcatgcttcattctatctgttctcttgagggtcatttagttagcaccatttttttttccttccataagcagagagtggctccctgtggctccacatcctcactggtgcttggtactatcagaatggaaggaggaagtttccccttctactctagaaaccttgatggtcccaggacctgggttcttgccctgagtctgctctcgctcacttcttgaccttgagtgactttgactgtccttatttgtgacatgaggaggtaggcgtagctcagaggttcataatttgagtgtttttgtttgtttgtttttgcttttgtattttttttgagacagagttttggtctcgtcattctggctggagtgcaatggtgcaatcttggctcactgcaacctccacctcccgggttcaagtgattctcctgcctcagtcccccaggtagctgggattacaggcgtgtgccaccgtgcctagctaatttttgtatttttaatagagactgggtttcaccatgttggtgaggctggtcttgtactcctgacctcaggtgatccacctgcctcagcctccaaaagtgctgggattacaggtgtgagccactgcacctggccctttgaatgttttttttttttttaattacaatttcacaaacctcctccataatagcagatgtagttgtagtatttgctgattgagaaaatacctgatcctaggtgactctgaattcagtaataatttacattattaatttgtatttcattaaacactgtaatatgtaagacattttgaaatggctctgcatgtatctgtgatcagtatatttattcagtttatccacaacgctttttacacatatggactcatactccataccctatgtttattcaccctccccccatctccccaccccacagtcacaacccagggttggaaaatattggactacagaacgtcagtgaagggggaagagagcatagtggtttcagaaagccctggatttgaatcctgcttctgccacttgctagctaatgacctcgggcgagttacttgcttcctgaaccctagttttctcttacgtgggcacacatgcaccaggcactgttcgaagtgtcttctatatattaatgttgtatgcttagaacagctcctggcacctaagtgtttttaaatgttagctctttttcttatttcagttaatcctcccaaccatcttaataacagagttatcattcatttatgtattttatttatttatttatttattgaggcagagtctgtctctgtcacccaggctgcagttcagtggcacaaacatggctcaccacaaccgcaacctcctaggttcaagcaatcctcccactttagctttcagagtagctgggaccacaggcatgcgccattacacctggctaatttttaaattttttgtagagatggagtctcgctatgttgcccaggctggtcttgaacttctgggctcaagagatcctcctgttttggcctcccaacaagcaggtgctgggattataggcatgagccactgtgcccagcttcatttatttattcaatagatatctattaaacataaacatgttccaggcattgattaggcactggggatatatcagtgaacaaaacaataaaaaactactgcctttatggagcacaccattatcccaattttacactgaaggaggctgaagcccagagaggctaagtgccttttccaagtccacacagtgagtatagagaaaaagcattcgggttgctttgtctgatgacacacaaaattctcccacactgtctgggaactgttcctgcccacacccagttcattgaatgcttcctgcagcagctgctctgggttcgtgaccctgctcctgacccttgagccacacggggaacttggattccattccttgtacttgggaccagagaaagtacaaagtcagctcgtggaaactgtaagaggcaaaacttgggagctggtggctgccatgttttcttccatatggagaatgataatctggagcaagagggaagaatggagctaaggaccagagaaaggcagagatgcataagagagaagcatctgtagccattttgagacccagccccatgcctctccttgagttcctggagacacccaatatccttataacaagcttcccttttttgcttaaacttgcaaccaaaggaatcctagttaataccgtgggatatggcaagtacctagcgagtgactgctgtaagattctttgagctcttgccacaccctagacttgctgttttggcttctggagctgagagtgtcctgctcttagataactttgcaatagattcactacttcagagcatgtgactgcaacctaactcttaataaatcagacaggagctttctgcatggaaaagagcttctgccatacatcatttttgttttcctcttggggagaacagctatgctacagcaataacctgccacgtatacatctcaaagccctatttatatagccatatggataaatatatataaataggactcgggaataatagattaaaggatctgctcatccgtagaagactttatggggctttcaggacctaatggtggcctgattcagtaagaaaaatgggtctctagtaggatgtggccaataattagatgagtccataacctgacagatgctcacctgggagatagagaggtcgggggaccttgtgaggggccagggactccaacagaataagctgtaagcgggaacaggaagggaacggatgtgcaaagtcatgaactctgagctgtcttcctagctcagctcctgttctgtgtgaccttgagcaggtcacttgccttctctgagctttagttcctcatctataaatgaggaatgtggacgtgctgacctacaagattcttttttttttttttttttttttgagattgagtctcactctgtgtcccaggctgcagtgcagtggctcactgcagcctcgacctcctgggctcaggtgatcctcccacctaagcctcctgagtaactgggactacaggcatgtgccaccatgcctgtctaatttttgcattttttttttcagtagagacagggctttgccatgttactcaggctagttttgaactcctgggctcaagcaatctgcctgcctcgtactcccaaagtgttgggattataggcgtgagccactgcgcccagctggttcttttcttctctgacattaaaatgactctgaggcctatgatcatggtcctctgggtggggaaggttgggaagatctcatctgagtttagcttatccctaggccttgaccaatcgctgatgctccttaagggtctcctacattttggaggcatatgcagaaggaacctgaagtcacaagatcagaggtcctgcggcagtttaaataacaatagcaacaactgctacgactacttctcccattattcagcacaactgcagctgggggatttaggttcatggtctgcagctaacatttattgcggacttactctgggccaggcaccattccttacgctttatgtatattatcctgcttcaccctcccaacgaccccaggaggtaggtactgtagcttctacaggaggtagaagcagaagcacagaagcctagtgtgtgtcccaggccacacaaccggtaagtgagattgttaagatgcccccgggagtctgtctccagaatctgtgttcctcatcactcctgcatactccccatttacaagggcagaaactgaggctacaggaggttaattgatctgtgaacagccaggatcctgggagttctcagacctgtccattttgtgagaagggaaaaagtctcgctgctccttgtgtttctttctgtttttccaagtcagtccattttttttcttgtaacaaaagtctatttacggaagagacatataggacccaagataaccatgcatcagtcatgcttcagtgaactcccaaatcaaagatgggctggataacgtgtacccgacgctcttggctttttcagcatttcagacgtttttgttgttgttccctctgtgggttgaaaccaggcttttgtgacttgatgaggacacatttttcctggggtgtaataatgccactggtgttagccctaatgctgaagagagaacatttgctattttggaagagttaatcccaaagcttctttcttttgctcctgcctttagaaaaggcatttctgaggcaggtccaggcaagagtactgcctctgtaatccgccctcaatcatcttagcgctaatcaccgagcttcattgagtactttgtaatgtgccaagctgggagctgaaggctgatttgattctcttaacatcttctgaacgggtatagctgttacccccatattacagatagggcactgaggcatggagcttaaatggcttgaccaagatgccccggcagcaaggggcagagctgggaatagaaccccgactccagacataggctattaatgccacagtctgctactccaggactgaccattacgtttgtggggagtgggaggggaatgaaactgcagggcctcttgttcaacaaagattaagactttaagactgctgggtgcagtggctgaagcagtttgggatgctgaggtgggaggatcgcttgagcccaggagttcaagaccagcctgggtaacataatgagacctccgtctctatcttttaaatataaaaaactaaaaaattaaaaataaaaataatgtaggccgggcatggtggctcacgcctgtaatcctagcactttgagaggccaaggcaggtggatcacctgaggtcaagagttcaagaccagcctggtcaacatggcgaaaccccgtctctactaaaaatacaaaacttagccaggtgtggtggcacatgcctgtaatcccagctactcaggaggctgaggcagaagaatcgcttgaacccgagagttggaggtttcagtgagccaagatcgcgccattgcactccagcctgggcaacaagagtgaaactccgtctcaaaaaaaaaaaaaaaaaaagtgttaagactgtgacggcagagtattaaccaactgtggagcccttctcagtatgaggccctgtgtgactgcacaggacagatgcccaggaagctggccctgactacccctttgggcagttccctggctgtcttccagcttccagccctcttttccagggggacaaaagcaccttggcccaggcaatgtgctttataccgccctgacagctatgaaaaagaatggcacagcctgggctttagaaagcttgggttgctgcaggttccttctgagcagcaggcagagagggctcaagccaagactgggtgccccagcccatcttctgcctcatcggtgcccccgagggctggcacttggcgaagccccaccccacctccaggctgtgtcttgtggagaacacagcccctctggactcctccctgtctctgcccatcctgtggctatgttcatgatggggcctcctggaggttcagagagggccagaacattgtcctttctttaagctttggtttattaaacaatggagaaatgtcaaaacggattgcaaaaattgtggtgtgcttcaaatgtgtgcatgtttaaaatcaaggccattattataaaaacaaataagatgcaatataaatgtgcttttcccaagacagttactggatttattcattcccagctcacatacacagtagaacccggtaatggaatacgtggtgttatgatatagatgggctgttgtccacggcttctgcttcatatctcccatagcccctgttacagcctttacttataatgttgggtgtattaggcctcaggggcaggcttcaggaaacagaatctctctcttgccctccattcacctaactcaagataggactctcattttctttttttattgagatggagtctcgctttgtcacccaggctggagtgtagtggcgcaatctcagctcactccaacctctgcctcctgggttcaagtaattctcctgcctcagcctcctgagtagctggaattacaggtgcccaccaccatggctagctaatttttgtatttttagtagagacacagtttcaccatgttggccagtctagtcttgaactcttgatctcaggtgatccgcccgcctcagcctcacaaagtgttgggatcactggtatgaaccactatacccagcctcaacttcccctgcctttctgattgtgggtcttaaggctttcttcagagagggtcccaccctgtaccctggggggaaaatgctttgaaacttccataaatacccaagaggactgggttgggggagctcccggatagctgaacgtgtgaagcctggtatcccagggaggggatggaagctccacgccctttctcctataccctatgcatctcttcatctgtatcctttgcaatatccttttttggagacagagtcttgctctgtgcccaggccggagtgcagtggtgtgatcttggctcactgcaacctctacctcccgggctaaagccatcctcccacctcagcctcttgagtagctgcgattacaggcatgcgccatcacgcctggctaatttttgtattttttgcagagacgaggtttcaccatgttggccaggctggtctcgaactcctggcctcgagtgatctgcccaccttggcctcccaacgtgcttggattacaggcgtgagccactgtgcctggctgcgatattcctcataatgaactggtaaatgcgagtgttcccctgagttctgtgagctgctccagcaaattaattgaacacaaagagggtggtgggggcaattgtgaagccaatcagtcagaagtttcagaggcctggacttgccactggtgtgtgctggagggcagtcacggggactaagccctcagcctgtgggagctgacgctatcgtagtgtctgaactgaattggaggacacccccctggggtccgctgcttggtgtgtggggaagaaacacacatacctttggtcataaaaattctgtgttgattgctgtggtgtgacagctgaggaaaaatgtggctggagagagtttttccctatagaatataattattttttagttttcattgaggtataatgcacgaagtatggggaaagtgcactgatcttaggtgttccacttgctttttatatatgtatatacctccataaccactaccgacatcaggatatttacagcacctagaagtttctctcaccccccttcaaagtcagtacccccgaagaggtcagtgccgttatgggttctatcacctaatgattggttttacctgttcttggatttcctataaatggaagaatacagtgtatattcttttgtgcttggtatctttctctgaacataatgtctgtgaaatcacctatgtttttgcatatggcagtggtttattctttttattgttgagtagaattccattacgtgattatgctgcaatatattccccattctcttgctgaaatgggcatttgggttgcatccagtttggggctattaggaggaaaatgctgtcaacattcttggacactcttttttttggtggatatatgcacccatttctcttggctggggtatgcgtatgtttagttttctgaagtggttgtaccagttaccactcgtatagcaatgcatgagggaaaatatacgtttaaaactgtaggatgaatatcctcttctttcgatctatttggtatccctctgtgaatgcagcattttgcagagatgtccaagtttgaatagcatgctgggcagccccctcgtgccccactgcgaccatatctgataggaaaattccacggagacactgctttctctcaggagcctctgtaccccatctcctccacattaccctccagctgccggggcaggggctttggaggtaggatgcctccaatctgactagctctgtcaatgaggtcatggaagggaaaactaaaccaagaaaggaagagccagaggggaaaaatgagggggaaggaagtggtcgcatgtgacagagagtcctgtaggatcttgggaaagccgtgtggatatctaacccgggatcctcagctgccttcactttttgggcagctcccatgggccaggcacatctgctgcttcgtgcaaccattccaacaaccttgtaaattcgctattattagaccttcccctgtgttaggcaccttgctaatgttcattacctctaatcttcatgactcctctgtggacaaaagagaaaaaggcagagcagaaagacaagccacttgcacaggaccacataggcaggaagtgccatcctaggactcgaaccagaccctgctgggcacagaggggaagccttgtggtacccgacaagcggagcctctgtcatcagaagttatttgctcccatgatgtgtgacctgtgtacatgtatcacaggtatatgagaatgaacacaacttccggcataggtgttgctcatctgaaaggctaagcacaaatggatgttttacaagttgaattacattacttaccaggggagttgattttttaaaaaaagatctaagaggagacatagggagaggccgttgggaaatgtgaccatatcttctgtgtggattttatagttgggactcgcatggacccactccccgctgcctccctcccactgtagtgctagcatgtgtacattgcaagaggctcagtgtcctatcttggtttgcagagaccccgaagtggtcagagcccctgactctggctctttgctttgtggccaggtaggtgtccacagcccacaggattcaggttcacgcatgaggggcaggctcctctcctttccctacttcccaccccagcacttgtggagagaccagtcatttctgccaggtctgtttatttcagcctgtgaagcaagctaacacagctagtgaagtcatagaaagggatgccctgcagttccaaaaataattgttctgtttgtcccctcaggtgggtgagaggagcaatcacaagctctggatgggacgtgctcatgctatggctggtcaccgtgatcactcagtcatctaaggggggcagtcctggtgccggccataccactcttgggcatgggggctgttaccagtggtagttatccatacgggtctgcagcaatctcagtttttgcctcctcagaagaaagaattcgactgaaggacataagaaagaaggagagactgaggcaagttttagagcaggagttaaagcttattaaaaaactttagagcagtaaggaaaggaaggaaagtacacttggaagagggccaggtgggcaacttgagagatcaagggcacagcttgacctcttgacttggggttttatacgttggcatacttccgggatcttgcgttacttctccccactctgcagatcttattgggaagttgctgatcagttttaggtgttttctgtctattaggagactgcctttccctggcgctggctgtgaccaattattattttagagaaacagttaacaactgcctgaccatcacctgatggttgcccatcactcctagtgtgtgtggtgtgggggagccgtctcctcccctgctctacctgactagttacctcgtgtgggaaggggcccccccaactcccactgcccagcctgctcctctctagaacagccagactttgtagccacaaagaattctttgagctaggcacagtggctcacacctgtattcccagcactttaggaggctgaggcaggaggatcgctggagcccaggaattcaagaccagcctgggtaatgtagcaagaccctgtctctactaaaaaaaaattttaaagagagttcttggtgggagatgtccttgcttctgcccaggaacagctggcaaagccaagtcaacagtagcagagggcttttctgtgagttctcagaagggccacccttaaaggcaggcaccagaaggctgggcgcagtggctcatgcctttaatctcagcactttgggaggccaaggcaggcagattacttgagcttagtagttagagaccagcctggccaacatggtgaaactctgtctctactaaaaatacaaaaattagccgggcatgatggtgtgcatttgtaatcccagctactcgggaggctgaggcaggagaatcgtttgaacccgggaggtggaggttgcagtgagccaagattgtgccactgcactccagcctgagcgactgagcaagactccatctcaaaaaaaaaaggcaggcactagagcttctggagctacgaaaatgtattgttctgagaggtgacagaagggcaaaagatgaaggttagatgaatggaggggagttcatatttttttagtacctacaatgtgctaggaactgtgtgaggtgcttccacatgccttatcctgtttgcttttcacagcagtcccatgaaatagatactatgtattataaatcccagccccctgccccgctttgctggcccgcaaccagtgtgctcatagggagtcctgtgctcagaaggacacctgcgctgtttaatgccctgttgtcactgtgatgtggtttggctctatgtcctcacccaaatctcatcttgaattgtaatccccgcgtgtcgagggagaggcctggtgggaggtgattggatcatgggggcagtctccctgctgctgttctcatgatagtgagttctcacgatagtgagtgagttctcacgagatttgatggctttaaagtgtggcgtttcctccctcgcgttctctctctctttcctgctgccttgtgaagaaggtgcttgcttctccctttgccttctgccaagattgtaagtttcctgaggactcctcagccatgcagaactgtgagtcatttaagcctctttcctttataaatcacccagtctcaggtatattgttacagcagtgtgagaatgaactactatgtgctgcatttccatcttgcactggactccacaaatttggtagtaggtcatgattatacccactttataaatgaggaaactgaggctccaaaaggttatataacctgcccaaggccatagctaggaaatggtggactttgcacttggtagtccgacagccctgtctgtgttcaagaccaaacccaccattatggtgcatttcattcaacaaagtgtatatattgaggccgggtacaggggctcacaccagtaatcccagaattttaggaagccaaggccggaggattgcttgaggccaggagtttaagactggcctgggcaacatagcaagacactgtctctattctatgaaaatgaaagcataggtattgagcatctgctctaaggctgatattctcttaggctcttgggattcatcagtgagcaaaataaagtccctaccctcatggggcttgcactctaacaaggtgtgtggtatgcgagtgctttggctcttaaggtgaggtccctggatctgcagcatctaacaagaaaacttgttagaatcagacactctgggggtgggcccaacagtcggtgttttaacagtccctccaggtgattctaatgcaactcaagtttgagaaatactgacctaaaaggtaatacagataaaagtgcagagcaatgagggagggagatggggagtctgcagtttaaacgggatagtcaaggaggggctcagtgaaggcttccctctgagcaaagctgtgaaggacatgaggaggttgccccctctggagcacacatgagccaggcagaggcggtggctggcagagaggcctaagggcgggagtgtgactgaagagcatgagggatactgtggggccattggcagggacgaagtgtggcaatcatgaggccatgtttcatgtgtcaccaagcctctgattctaatatgcttttcttgcatattccagccatgtgactgttgcctggagggaccattttggtatagccacccacagagaagcaggacaaataaggagttgtttctcaagatgggcaatcacgcccttcaaggagaagacagaggacacaagtgttctccagtttcccctccagcttgagttatctgaaagcactgcttaatgaatacacagatcgggcttcattgggaaacagaggctcctagccaaggcccctgatgtggcattctcattttctgggtggtaaccctgaggatagatcagggacattttcattaagtgtcaagcgttccttgagctccagcaaatgacgcaggaagcttcaggactctaccacagggacagcaagtctgccatctaaagcttttcctcaaaatttcagggccacacttgtcatgcagcatgaaatcccaagggagaaaaatgttgacacagttgaccaacaggggctcaccctctgccttagaagaggccctgcctctggtgactttgtagtctcatgtcccagggagggcccccctcctcctctgtctctttctcattgtgttcctagtctcggcccattttatagatgtgaaagctgaatctcagctgggaaatcatctataaaatggggataatgaggaattaaatgcaatgatatacattgtgcacttaatatactatctgacataataaaatcagcactcaattaaatgttggctaatattatccaggtgtccaacctggaagttaccttccattttgctttcttatcacccacacgtgcaatccttcatccagtctattcatcctacacccttaatatttcttcccttcctctttccttctaccactactaagagtcctagtcctcatcatcctgcatttgagggaggtacagattctgcacaagggctgagatggagctagtaaatggcggatttggcatggaaacccaagcctgctgagatccaagacttcagtgattctcacattaacgtatgtatcggaatcacctggaatacttgttaagctacagattactgggccctgtttccgaggggtctgattcagtgattctcacattaacgcatgtattggaatcacctggaatgcttgttaagctacagattactggaccctatttccgggggtctgattccgtgattctcacattaacgcatgtattggaatcacctggaatgcttgttgaactacagattactgggctctatttctgaggggtctgattcagtgagtctcacattcatgcatgtatcggaatcacctggaatgcttgttaaaatacagattgctgggtcctatttccagggggtctgactcagtgggtcttgggtgaggcccaagaatttgcttttctaacaagttcccaggtgatgctgatgctgttgattcaaggactacactttgggaaccaatgcattttagcaaactagtggttcttaaccctggctgtacattgcaatcacctgggcacttaaaaattctgatgccagcccccgtctctgaaagtctgattgaattggtccacagtggtgtctagacattggcgttgttttctaatgtgcagccaggaatgaggactactcctctaaacgctgtcaatagggagtatagaaggagtagcaggttcctgaaggcaaataatggtcctttttccctaaaatacagaaacataatgacttctgctttcaagctcaaaacccacagcattataaaccaatctgttcagccccagttagatgctaattgagtttcctctctgggctgggtcttgttctctgtggctttttcaacaacctgagtgtggactgattggggccaactggttggtgggaaatgacaagatggaaatccactgagaagctgatgacaggtctaccttgcaactgggcatttttcttgcaaataataatctgtggtgatttcacttaagtttgcagcagcatgttttatgaccacagtcgttgcataattatgcaacggaaatgtatttgaaattgcttaaatggttatataggcaggatttgctcaagcatttgatgtatactttttaaaagtccacatgcatttggattaccattgaaatgtgcttttgaaattggagtttgctgttcccagtttagtgctgagaaacaggagggttttttgtataacctaaaagcaataatgcatttagaaggtggcattaattctttctaaggatgattaaatcttatctggtgataaattgtttaggaactaggcagggaggctgggtctactgccttaaagtgcaaggaaagtaaaaacaaacaaacccccccaaaccaaaaaagtccaaacaaacaagaaaagttgaatatcttagttcattggctattatcaatacaaaaacaaaaatggtgaggatgttgtctggatagaggatgaagaagagaaattgtaatcatggggtagtaggccttcagacttggagctgaagaaggagtctaaccagggagctcaagtccactgcctacggaagtctaaatgagtgaaggaccagcatgtgcccctttatctttctttctttctttttctttttctttttttttttttgagatggagtttcactcttgttgcccaggctggagtgtaatggtgcgatcttggctcactgcaacctccacctcccgggttcaagcaattcttctgcctcagcctcctgagttgctgggactacaggtgtgtgccaccacacccagctaatttttgtatttttagtagagacagggtttcagcatattggccaggctggtctcaaactcctgacctcatgatctgcctgcctcagcctcccaaagtgctgggattacaggcgtgagccactgcgcccagcctgtattattatcattattttttttttccccgtagagatggggtttctccatgttggtcaggctggtctctaactcccgacctcagatgatccacccacctcggcctcccaaagtgctgggattacaggtgtaagccaccatgcctggccttgcccctttcaaaaggagcagccagctgttccatccatgaatgtgggccccatttcatcacactcctctgagttttcaagagaagacagaattcaagattttttgttttgttttgagacagggcctcactctgtcacccaggctggcgtgcagtggcacgatctcagctcactgcaacctctgcttcctgggctcaagcaattatcttgcctcatcctccttagtagctaggactataggtgtgagctaccaatggctggctaatttttgtagagatggggtttcaccctgttggccaggctggtttcaaactcctgagttcaaagcaatccactcacctcggcttcccaaagccctgggattataagcatcagccacagagcccagcctagaattcaagatgttaatataaactttctcaatttaaaatgcttgcttaggctgggtgtggtggctcacccagcacttaggtgatccgcctgcctcggcctcccaaaggtcaggagtttgagaccagcctggccaacatggcaaaactcctgtctctactaaaaatgcaaaaactacccgggcgtggtcgcaggggtgcctgtaatcccagctactcaggaggctgagacaggagaatcacttgaacctgggaggcagaggttgcagtgagccgagatggcaccactgcactccagtccgggtgacaaaagtgaaactccgtctcaaaaaaaaaaaaaaaatgctcatttaggctgggcatggtggctcatgcctgcaatcccagcactttgggaggctgacgtgggaagattgattgaggccaggagtttgagaccagcctaagcaatatagcaaaaccacatctccacaaaaaattatattaaaaaaagccaggcagccaggcgtggtggctcacatctgtaatcccagcactttgggaggccaaggcgggtggatcatgaggtcaggagatcaagaccatcctgggtaacacggtgaaaccccatctctgctaaaaatacaaaaaattagccaggcataaaccccatctctactaaaaatacaatactcagccaggtgtggtggcacgcacctatagtcccagctactcaggaggctgaggcaggagaattgcttgaacccgggaggcagaggttacagtgagtcgagatcacgccactgcactccagcctgggagacagcgagactccatcacaaaaaacaaaacaaaacaaaaataacaaaacaaccaggcatgatgacatatgaccgtagtcccagctactcaggaggctaaggtgggaggatctcttgagcccaggagttaaagggtgcagtgagctatcatagcaccactgcactccagcctgggtgacagagcaagatcttatctctctctttttttttttttttgagatggagtctcactctgtcgctcaggctggagtgcagtggcgtgatcttggctcactgcaacctctgcctcctgtgttcaagtgattctcctgcctcagcctcccaagaagctgggactacaggtgcgcaccaccatgcctggctaatttttttgtacttttagtagagatggggtttcaccatgtttgccaggctggtctcaatctcctggcctcaagtgatctgctcacctcggcctcccaaagtgctgggattacaggcataagccatcatacccagccaggaccttgtctcttgaaagaaagaaaaaaagcttgcttaagtaagataaatattctgtgggctttatttagatcatatcaatgatcttgcccaatccccttattttacagagaagaaacatgccctagagggtttattgatttaaataaaggcagtccactcagagatcctttgccttcagggcgttcatagtcatgtgtggggaaaaggtaggaaatagaggtagactataatggagtggcctctagaatgcagttaatggagaggcagtggtctcatctggcctagcgatcaggaaggacttctctccagggaggaattctcagctgagtcttggcagaggaataggagttagccaactggaatggtgcctctttgcaaacacccagggacatgaatggttgaagaactgcaggcagctgcgggacagaacccaggtatagaaccaaaaggtcacaggctgaaccccaaggagactctgagcaattgggagattctgatatggctaaaactgtagcccacgccccaagatgtattttcacagtggtgaaggaaaaagatgagttaagtgtctgagaatctgagagcgggggcttagccacgcctgaggaaaagggtgacatgtcaggtggtgaagtatagttttggcttttgttttttttcctacttgctctgaaatcagcattccaagctctgtcatcagaacccctgaaaggctgcctgattccttcatggaaatggctccttctgcttttaagagctcctggtgttctgagtggatgagtcttcacatttcaaaaatcagcgtgatttccctttggtaaccttggcattcattgcacctgatcagggaggttttctttttcagtcctgatgccttaaaagagggaatccagattgtttttctgtgtttcatgtgctttagggagttttctttttttttttttctactcatattgttactcaaacagggaccactaggtgtggacagaaataaaggttgtcttatttcctccctaggtcaattgttaactggctgtctccatgacttctctaagtgttgacgtctcactattttcagtatttccttggcactgtgatagactttaggatctggactctgcccctgcccccatgaagcaggaaagagacagccatgggtgatcaaagttgatatggtttggctttgtgtccccacccaaatctcaccttgaattgtaatccctataatcctcacctgtcaaaggcaggaacaggtagaggtaattgaatcatggggatggttttcccccatgctgttctcgagatattgagtctcatgagatctgacggttttataagtgtctggcatttcctctgctggcactcattctctctcctgccacactgtgaagaggtgccttccgttgtgattgtaagtttcctgaggccttcccagccctgcagagctgtgagtcagttacacctctttcccttataaattatgcaggcttgggtactccttcatagcagcgtgagaatggactaatacaaaagtcatgacatggttaaatatgacatcttccaactgcaacaacaacaacaaaattacaaacagaaccaggggtttagcaggaatcttatggcagggagtcaagagtttgattccttttattgttgggaacactgattctacaagcaaacaaatcttgacctgccatttattttttatttctcttaaattaaaaaaagaagaaatgggccaggtattgtggctcatgcctttaatccagcactttgggaggccaaggaaggtgaatcacctgaggtcaggagtttgagaccagcctggccaacatggcaaaattccgtctccactaaaaaaaaaaaaaaaaaaaaaaaagccaggtgtggtggtgtttgcctgtaatcccagctactcaggagcctggggaaggagaatcacttgaccccaggggacagaggctgcagcgagccgagattgtgccacacactctggcctgggtgacacagcaagactccatctcaaaaaaaaaaaaaaaaaaaggtggggcgcagtggctcacgcctgtaatcccagcactctgggaggccgaggtgggtggatcacgaggtcaggagatcgagaccatcctgggtaacatggtgaaatcccgtctctactaaaaaaaattagccgagcgtggtggtgggcgcctgtagtcccagctacttgggaggctgagacaggagaatggcgtgaacccaggaggcggagcttgcagtgagctgagatagcaccactgcacaccagcctgggtgagactgtctcaaaaaaaaaaaaaaaacagaagaaatggaggtaaaatttacataacataaaaatcaccattttaaccactttcaagtattgagtttagtttttttttttttagcataatgccatgtaaccatcaccatgatctaatctctgaacatatttattacgcctgaaagaaaccccatacccgctcctcattctcttacccctagctcctggcaaacaataatctactttctatctctctggatttgcccatggacatttcatataaatggaatcatgcaatatgtggccttttctttctggcttctttcacttagcataatgttttcaaggttcatccatgttgtagcatgtattaatacgtcattgctttttatggctgaataatgttccattgtatggatatactaaattttgtttatccattcatcagttgatgggcataggggttgttaccacattttggctattgtgagtagtgtgcctatgaacacctgtgtacaaatttttgtttgaacacttgtttcaattattttcagatatacagctaggaggtgaattgctgagtcatgcggtaattctacgtttaacttttcgaggaactgccacatgtttttcacagtggctgaaccattatacattcctaccagcaatttattagggttgcaatttctccacattctcaccaacacttgtcattgtttgtcttttttattatagccatccttgtgtgtgtgaagtgatatctcattgtagttttaattttcatttccctgatggctagtgatgctgagcatcttttttatatgcttgttggccatttatatatgctctttggagaaatgtctattcaagttctttgttcatttttcattgggttggttgtttttgttttgttttccttcttacagataggatcttggtttgtcacccaggctggagtgcagtggcacaatcatagctcactgcagcttcaaactcctgggctgaagtgattttcccgacttgtcctcccaggtagctgggactagaggtacacgccaccatgcccagctaatttctaagttttttgtagagacagggtctcgctttgttgcccaggcttgtctcccactcctggtttcaagtgatcctcaagcctcagcctcctagagcactgagattacagaagtgagccactgtgtctggcctgtttgtctttttgttgttgacttgtaagaggtctttatatattctggattctttatatgttctggactcatatctatgatttgtaaatattttctcccattctgtagactatcttttcaatttcttgacagtgttctttgaggcacaaaagttttaaattttgatgaaatccaatttatctatgttttcttttgttgtttgtgcttttggggttctagctaggaaaattttgcctaatccaaggtcacaaaaatttacacctatgttctattctaagaactgggttcttacatttaggtcttggatccattttgaattaatgtttgtttgtggtatgaggtggggacccagctttatttttttgcatgtggatatctagttgtcttggcaacatttattggaaagactattctttcaccattacatggtcttggcagtcttgccaaaaatcaattgacaatagatgtgtgggtttatttctgaactctcaattctatttttaccatttatccttatgctagtatcacactggttagattactatagctttgtaatatagttgtgtccaatgtagttgtgtcacacccccacctcccccagcccccatttaattgccctggctagaacctctagtacaatgccaaatagaaatggcaagagtggaagtgcttgtctacttcctgatctttaaggggaacgccttcagtcttttgccattaagtatgatgatggtggaggcactttcatagatgcccttatcaaggttgatgaaggtttccttcttgtagagtattttcattatgaaagggtgttgaatttttttaagtatttcttctgtgtctattaacatggtcatatatttttttcttattctattaatatatgagattttttttcttctcgacaccaaatacatggtatcttttccaataccacttctcaagttctttgacgccaactgcatggccaataatccaattcaattctgatatgaactatccaaagttagcccagaccctagaggttaaagtctcagtcccataagactgctcccacttcagacaccagccataaatggagtgaccaggatactcaaatttcttccccgccgactacaattttgggagttccaatcacccctccccaggttcaatagttgaatagaatgactctcagaactcaggaaaacactatttccagtttgttataaaatatgcaactcaggaatagccaaatggaagacatgcattgggcaagatacatgattaaaaaactcagtaaatattgattgcattaatgacataaatgccactgcctaacaacagagtatttctgaatattttagttgtgtatgtgtggttaattggtggtggtggtgtttctacagcatctaaggtgaattgcccctagtcatcaccgtcctatatctcagtgtacctgacttgtcacaacctcttagaaatggctgtccaggggttcatacaggtgagtctttcctggagtcaaaccagagctgacaactatacataaatcctgtgaccttgaccattttaacatttggactagctaaatcagacaatagatctttaccttccaaatgttcaggcctaaaatgttaatgtcaactcctaagtgcgttgtgcattagaaagctacaaagagttaattccaagaagccattcctattaatcttggtgtctggataaaaactaaatttgggacctcaattacctgatcgcgtcccatgtagatttcgccggcagcaatattgatgagggcagcaatcatttctcccacttggaaacacaattgcaatcccatcctaagcaatctgtccttcaagtgcatctggaagtgggcattattttctcttttgttttgttgtagagagagtttttcagttccagaatctttaaccctttctgctccatagcacagccctacttgactgaagaagagaaatcataccactaacatttcaattcttttatagtttaggaagcatttaatgttatcctgtctcagtgaatcctgatcattgctcagtaaatacgtttggctatgctcattcatcagaggcgggacctgaggtttgaagatgttaagtctcctgcctgtgccatccagttggtaaggggcagagagagagttgggactcaagctgtgctagtttctctgggtttataggctacagaggatgtcattaaataggtccaggtgttttcaaaaggccacagacacaaaagaccaaaacttcagtggcttgtgggggcgatgaagggcaaagtctgattgaaggactgtgagggaggagagagaaggattttgaagaggggattggaatgggcactattggcagatgatacagtgatactgccatcaactgctgaacatcccagcctctccagctgtggtttgtgtcactgaccttcatttatttatagttcccctacaccaacccttgtcaattatctccctggtgaattattggtgatgtgtttttgatcccaaaccacctggcgcatatctggtcatctacctagacagtgggcatgtggtcagagagcatgaattcctctgagtaggtctctacgcaaaataagtcatggaagcaaatccttatttaaaaaatagtcaagcggtggtggcaaaggtcatgcacactgagaaagatgaagagccttctccaagccatgctcctgtcattaggaccagctggtaactggtcctgtatgaagaagagagagcagtagctttgtgaagagagcagctttatgttaccttcgctctttcgcattttatcattgaacaaagggaaagagaatgagacctgatggaattcgtccattcatctattctttgcatttaatcctgtattccttcactcaataactatgtattggctgggcatggtggctcatgcctctaatcccagcactttgggaggccaaggcaggtggatcacctgaggtcaggagttcgagaccagcctggccaacatggtgaaaccctgtctctactaaaaatacaaaaattagccaggtgtggtggtgtgtgcctgtaatcccaactatttgggaggctgaggcagaagaatcgcttgaagttaggaggcggagattgcagtgagccgagatcgcaccactgcactccagcctgggcagcagaacaagactccatctcaaaaaaacaaacaaacaacaacaacaaaaactatgtattaagcatctactggggtctgtgctgagcactcaggatgcagcaatgagcaaaccagataccatctttgccttcacgaagcttggagtctaatagagaaggagaaataaataattacaaataaggtaacgagccagtaggaaagtaaacaggaccctttgctagagaacactaagagacttacttggattccatggtcataaagatgtctttttgaggatgtggcagttaagtcctgttttaaacatgagaaggagcccatttcgaggtaaagaaagtggctaggggatgaagagttttccatgcaaagcacattctaaagcacaaaggaacagcacatgcaagggccctgaggcagcaaagagattagggccttcaaaaaaaacagaacaaaccggctgggcatggtggctcatgcctgtaatcccagcactgtgggaggccgaggtgggcagatcacctgagctcaggagtttaaggccaacctggccaacatggtgaaaccctgtttctactaaaaatatgtaaattagctgggcgtggtggcacatgcctgtagtcccagctacttgggaggctgaggcacaagaattgcttgaacctggaaggcggaggttgcagtgagccaagatcacaccactgcactctagcctgatcgtcagagcgagactatgtttccaacaacaacaaaaaagaaactcgttacagctaatgagtgaggaggaagaagaatggtaggcaggggccagaccattgcaaggccttgctcctttctccaaagctgcctactccccactaacccatgagactttgcaagagtgtgtccagtagaaaagggccaatcaatttttcactccttcatattctatgtctactcttctaccatggtctcttgactttgggcttgaccttgtaactttgttttagccaatagtatgtgaaggtggcaagggctagaaatgtgcttatgcagctgggaatatccctgtgtgtttctgccttttcccattaaaagaacatgctttggggagtcccaggaagatgacagacatctggagcagacctggacccaacctgaagcccagagtcaagctccgccaagcccaggttaaggtagtatgccattgagttctttggtttttactgagtttgtttttttccattgaaattttggagaggctttttacacagcattattcttccaatagctgactaatacaagcaggacaatgagaacttctctaagaaatgattgacacagaaggcatatgtagtctggagaatggaaggaaaaaaggaacctaagaaaggagagtaaaatgtgtcacatgacagaaagatgagatttgttccatgaaaccctaaagtagatgtctgagatccatgagcgaatatacagggacacaggtttagccatacctagggaagaattttttatcaactaaaaagtcaggaaaatgaaatgacttatctcagagactgtctttcaccaccggcgagcatagaaatgatgattagtgcctactatgtgccaaggactctcatatttttcttttattttgtggtaattctcacacacacacaaatttttgagataagaattattctacagataagagaattgagattcagagaagataagaaacttgcaaaaatctatatctagccagtaaattgcagaagcaggatttgaactgaacctagatctggctggtacttagatcctgctgatttagaagatggtttccaggagatccaagtgctgaatggagagtgatacctaaagcctgggtccataagccatcctgttttggggataaagttttcacttgtctttggcaagttttcactactggggaaagaggaggagtggggaggggaagggagaaaggtaatgagtttttcataatgctgaattgttccatttaaatggctttcttttattctgacattctatcttttcaattattctttaaaaaaaaatccaataatgacatttaatgatccaataatgttccttgtcagtgtccctggatattttagaatgatatgggatgtgaaacctgaaagtctagaagccactatctggatgacatccaaggactcttccagcctaaacttctgtaacttttctttcttaactctaaaggtcaaattacaggctcgagggcctcaggaatcagccccggcctgcacttgcctcgaggctgagggaggactgcagggttggctgccttttcctggctggaaaagggggggaaagcctcccggatcgttcgctgcatgagagctgtctgcctttctctcaggtcacccattttgctgattcaatggcaataggtcagcgatgtctcatctgtaatggtctttgtcataacgttatgacagaaagggtgtggcttgtccaggtgccctttctgagatgagaatgcctgttaagcagctaagctgagctgtgtttatgctgatgagccctcgcagcagaaaccttaacccccacccctcaacagagtcaaagtggtcaaaggtggtagggtggtggggaagggggggtggggtcagctccttagccacaggtgaagctaactagcagggactcctggaaggctgcagtcctgactgattttttttttttttttttttaaagacagggcctctgcccaggttggagtgcagtggtgcaatcacagtttaccgcagccttgatctcgcaggctcagatgatcctcttgtctcagcctcccgagtagctgggactacaggcttgcactaccctgcctggctaatttttgtactttgtgtagacatgggttcttgctgtgttgcccaggctagtctcatgctcctgggctcaaacaatcctcctgcctcagcctcccaaagtgctgggattacaggcatgaaccactattcccacctccaccctaccagttttttaaaacagcttcattgagatataatttacatatcatataattcacccatttaaagtgtatgattcagtgatttttagtattaatgtattcacaaatacacgcaactctcaccacagtcaattttagaacattttcatcacctcaaaaagaaacccataccttttagctgtcacttcccctcttgttcattccataccctcctgcctctggcagccacgagtctagtgtctgtctctatcaatttccctattctggacatttcatataaatggaatcatataatatgtggccttttgtgactggcttttttcacatagcatgatggtttcaggatttatctatgttgtagcatgtctcaacacttcattccatttttttagactttattttgtagaacagttttaggttcacagcaaaaatgagcagaaagtacagagaatttcctcaaccccacacatgtatagcctcccccactgtcaacactggcaccagtggtacatttgttagaactggtgaaactgtatggataccttgttatcatttaaagtccgtagtttacattaggattcactgttggtggacattctatagatgctgacaagtgtgtaatggcattggcgggtattcaccattacagtattacacagaatagtttcactgccctaaaaatcctctctgctttgctattcgtccctcctccgaagtaactgttgatatttttactgtctccatagttttgctttttctggaatgtcatgtagttagaatcacgcagtatgtaggcttttcagattagcttctttcacttagtagcgtgtcgataacatttcattgtctggatataccacagtttctctattcacctactgaaggacatcttggttgcttccaagtttgggcagttatcaatacggctgctatactttatttcttttcttggttgaataatattccatggatataacattttgtttatctacttatagttgatgggcatttaggttgtttccaccttttggctattgtgaacagtgctgttatgaacaaattgagcctgttttcaaacaaatattgttttcagttcttttgggcatatacctaggagagcaattgctgggccatatggtaactctatatttaaccatgagatgaactaccaaactgttttgtaaagcgagtgtatcatttcacattaccaccagcagtatatgaagattctgatttttctacatccttgtccaacgtttttattctagccatcctagtgggtgtgaagtggtatctcactgtggttttgttttgcatttccctgatgactaatgacacagagcatcttttcatatgcttattatccatttgcatatcatccttggagaaatgtctattcagatcctttgcccattttttaattgggttatttgtctttttattattgagttgtgagagtttttttttcttctatattctggatacaagtctcttatcagatatatgatttgcaaataatgtctcccaccatccactcttacacagtgctctcctccctcttcctgccccctgcaaagctggtaacacagtaggagagttttgatttgtttttaaaaactcatctacttctggatatataccctgtattagtccattctcacactgctataaagaactacttgagactgggtaagttgtaaagaaaagaggtttaattggcttatagttcaacaggctgtacaggaagcatggctggggagacctcaggaaacttacaatcatggcagaaggtgaaggggaagccagcacatcttcacatggcagcaggagagagagagcaaagggggaagtcctatatacttgttaaccagttctcaagagaactctgtcgggagacagcactaggaggatggtgctaaaccattagaaaccacccccatgatccaatcacctcccaccaggccccacctccaacactcgggatcacaattcaatgtgagacttggatggggatacagagccaaaccatatcataccccaaagaattgaaaacagagactcaaacatagaagatatctgtataccaatgttcatagcagcattattcacaatagccaaaaggggaaacaactcaaatgaccgttaatggatgaaaggataagcaaaatgtagtatatacataccatggaatattattccacttaaaaaaacaatgagcctggcatggtggctcatgcctgtaatcccagcacttttggaggctgaggcaggcagatcacttgagctcaagagcttgagaccagcctgggcaacatggtgagaccctgtctctaccaaaaatacaaaaacatagccaggcatggtggtgtgcacctgtggtcccaactactcaggaggctgaggtgggaggatcacttgaacccagagggtgaggcagaggctgcagtgagcctacattatgccactgcatgccagcctggtgacagagtgagaccctgtctcaaaaaaaatttgacacatgccacaacataggtaaaccttgaggacttcatactaagtgaaataagccagacacaaaggagaaatattgtatgattctacttatatcaagtacttagagtagtcaaattcctagagacaaagtagaatggtggttgtcaggggctggtgaggagggaagggagaatggagaactgtttaatggttatagagtttcagtttcagaaggtggaaaaagttctagagctggagggtggcaatagtcatacgtcaatgtgaatatactggcagtggttcaggcctgtaatcccaacattttgggaggccgaagctggtagagcacctgagctcaggagtttgagaccagcctggacaacatggcaaaaccccatatctactaaaaatacaaaaaattagccgggtgtggtggcaggtgcctgtaatcgcagctactcgggaggctgaggcaggagaatcacttgaacccaggaggcagaggttgcagtgagtgagattgcaccactgcactccagtctgggcgacagagcaagactctgtctcaaaaccaaaaataaaaacaaaacaaaaccagcttggccaacatggttagactccgtctctactaaaaataaaaaataaaacattagccgggcagggtggtacacacttgtaatcccagctactcgggaggctgagacaggagaaccacttgaacccaggaggtggaggttgcagtgaaccaagatcgtgccactgcactcaagcctgggtgacagagggagactccgtctcaaaaaaaaaaaaaaggttaaaatggtaaatcttatgtatattttaccataagtatcaattaaccaaatgaaagaaaactgaaaagaaaaaaaaacccaactcacccatggactctgcccaagaagcatgcctctcctgcagctggctctgggttgagcctgggggttcctctaaaacgaatgtggacagccgggcactgacctgagggctgccacctgccaagactgagaacaggtggtagaagtgatgagaatgcggaaaaacaagagaggcactctgagatggaggggcctggggaggccatgcagattgttggaacgagatctggagtcagcttgcctgaatttgacttctggttctactatgtgacctcaggcaagttaccttgcctctctgggccccagcttcctcacctgtaaaaatgggggtggtaataattatttcttgggaagatgtgtggctcagagagagagtgtgccaagagatggccaatgtcaggaacgctggccttggagagaaagtcctggaggaaggtttctactctgccccatccttgctgtctgtctgatgtcggtgggcaagatgctcgatcatgccagacttcagttttcccatctgcaaagtggagataattataccagcctctgttatatgctctgaagttatgggctggataagaataccttctgtaaatggaacagccttatataaaagcaaaatggaggttaaagaataaagatatccttggcattataatgaactgttaacccagggtattatagttaattaaaaatgatcctgcataatatgtagccattaaaacaaataattatgcagactgtgtagaaacaacaccatttataagaggtagaatgcttacaaaattatatgtacatgaggatcagaactgtgtagaattatgtataatgcagacaaagactagaaaaggatcacgaaaaatctaattgtgcacaggcatggcgaagatgatgggtgatttaaacacattcctttaaagtcattgttatattgttttgacaataatatgatttaaaaaaatagatgtggcagggggtcatatggggacagcctgtatttgaattctggctttgtgtgctgctgggaatgaaaccacatttttttgctgggtcgtgtggtaattcaggagtttgaattgcccctgcagagccctgcccaaccttccctgtctgtcctgttctcagtaccacccgctcttcctctgctgatttcaggactgacagatgtcaacacgagatggaccaagcatccgtcctagcaccactgctgcggaagtgggccatttcacattctgacaagttactcagcctcctaagcctggatcctgtatgtaaaatgaggagacctagtccccgtcctcacattcccaactcatagggttgggaagaggatagaatgaaatagtagatgtagaataacccaactcgctggatcccaccaaacaaatatgggcatcactgctcctatttaactgcagagggaagaggggctccacatcagtgcagctaactgcaaccgaagccagcttccttctcattccaacccctagctatatttgagaaatctccaatttatttattaacatgcttacatcccttcaagtatagaacatatgggatataactgtgctttcatttaagatgcttttttaagtcaaataacagagtcccctgttcttcaatccccagagcaaccacttcccacctttttagatgtttttctctgagtgttttctgcatgtctttaagtaaatactgcttttttaaattttttacttttttattttttttgagacggagtctcgttctgttgccaggctggagtgcagtcgcatgatcttggctcactgcaacctccccatcccaggttcaagcgattctcctgcctcagcttcccaagtagctgagactacaggggcacgctaccacacccagctaatttttgtatctttagtagagacggggtttcaccacgttgcctaggctggtcttgaactcctgacctcaggtgatccacccacctcggcctcccaaagtgctgggattacaggtgtgagccaccgtgcccggccggttttttatttcacattttaaatgcctactcattgacttcctgctacactggaaaatgacttagctcacttacacccctcctccatctcccttcctctcattctcccaacacagctatatcactattttggctacaattgtcaccttcagaaataggcttagactgcctcttgttcatctactagtatctcctgacaccgcccaccaatgctttataagaggcggctggtgcctcagccttccttccttctctcctccttccttttctctccaagcctctgtcatatatacttttacattctactgactgaaagcttcctcattctgtttcataattctaattaagtcttctatgctttgcttatagattgattgtaaaatcaataaacaatgcttacattattgaaaccatactcctatggttctttgtccagccggtattatatctgtttatgattgctttcttgtgatacttttctttgatctggaattgcaaaatgcttttttttttttcttgcactatttgactttatcatgttctcaatttccccctgactttccttcccagtgggcattctattgagttttttttgtcctccccaaggtctaccttctacagcccctgtcctcctccttcggtctggacagttatcatttggggacttcacgccatgctttcctgggttcagacacaatttctgagacttaggttgccatctagatttttctttattttgccagagcatacccactaagtgacatcctacacagaagtgtgtggtaggtaaaacttctgaatcctttatgattagaaatttacttattctgcctttctacttgactgataatggggctgggcattgaatcctcggttgtaaatagaattcccttaaaatttgaaggcactgatctattcccctccatattgattttcctattgaaaaatcctgattcttgctttacatacttagaagcaaaaaagaaaaaatatttgggcttggcacagtggctcatgactgtaatctcagcactttgggaggctgaggcgagtggattacatgaggtcaggagttcgagaccagtctggcgaaaccctgtctctactaaaaatacaaaaattagcctggcatggtggcgcacacctgtaatcccagctactcaggaggctgaggcaggagaattcgcttgaacctgggaggtggagattgtagtgagccgagatcatgccactgcactccaggctcaaaaaaaaaaatttttttttttaaaagaaaacacggattcattgttattattgcttcataaggaatgtgaccttccatgggagttttatggtgctctttttatccctggtgacctcttatttcatagtgtagtttctaggtgtgagtcttgtttcattcattgtcctgagatctcttaatctcagctcttctgtctttcacctctgagaaattttcctatattatttctttgataatttcctcttctgtttttcctgtcctcttttttcagaaactcctattagttggatcccaatttgatcctctatgccccttatctattggctcatttttttccatctctttgtcttgatattttcaaatttaaatatttaagtgtgagaacaatttatcttttctggctgctacatagagtcttacatgaaaatgtatttcttgttatattgtttctgtaataacagtgacagacatttcaaacaagtttcactcaatggtttaagaattaccataaaagaggaaccaaaattgccttaaatgagcaaggctctgaaaacttaactacaaaatgagagtaagggcttttagaggcataaaaggaggattgcggtaactatgctaggcgaggcaggagccagctcaggggaaaaatgctatcttagcgactggttgcaggtgctgcctcaggtcaacaggcttgtgggcatgctgtcccctgctccccattcctgccaagaagtgggtaatgtcagcaagtcaggtagtggggctgaaagagtcaaatcccaaatctgtgatagggtcttctctgagcaaggcagctggatcaagagtgccggtggtcttcttagcaaggagacaaacccatcaatgcactaggcaggaggaggcaggagccaggcaggcaaatgaagaattaggctcaggcaagggctcagggctcagcttgagtggacgacaggggcggctaataagtggacagaggcattgaatgctgacgggcactcaaggccatgtggatcaaaggaagcagcactctcctggcccatggggctgaagaaactcttccccaacgtatgccttctacctccaggccacaggatcttcctccaatgaagatgaggcggcagagtaaccggatacaacagaggttcaagggcctttttgatgttctgggaccctgcgtgtgtgacttacccttaagcccatgttcatcctttgtgcatgctctgatgttgcccaaagcatctctgcaaccctgtgccatttgcagtcaggtttcattgtgaaggaataagaggcagtacacacacacacatgcaccccatcaccaccaccacaccaactcgttcttttctgcacacacaagtgtgtggagagtctgcccatctccgtgcctgcacagagtgtgggctggaaccccaacactgaattggatgcccttcccgtttctgtgtcccacaggggagcagacatgtgcacagaggagggctggcaattccttcatggttcagctgcctccaaatgagatgtttggcaggagaggaggactgtcgcctgttgtccctatgttcattgtttatttgctaaaggaataatttaggtaattagttattcatgcaaatgtttacttactcaaaaaatgtttggtagttccaataatagtaataataattagcactcactgagtgcacactatatgtcaggcacagtgctaagccctttaacctccactgtgtgccagattttagaaagataaagaagtaataacaatattcaaggagtagcgagaccagtgatcaacattgcaaccaatttttgaaaccttcacaacagccttgggaagcattattcttgaagtgtaacataatggttaatagtaaggccttttctagccgggtgtggcagtgtgcacctgtagtcccagctgcttgtgaggctgaggctagaggatcacttgagcccaggagtctgaggctgcagtgagccaagatcgtgccactgcactccagtatgggcaacagagtgagaccctgactcttaaaaagagtaaggcttttgtactggggacctggattgaaacctgtctatagctcttgttagctgtgcaaccttaggcaagttacttaaatgctctaagcctcagtttttccttctataaaataggcatggaattaataacaggtatacctaatgaagttgcaatggtcaaatgagataatgcatataaaatgttaacacattgctgggaacatagtgagttgttattaagtccagggtaccataggatcccaggaattaacttagcataatgttagattaaggcagccaaaggcattaatattcacaggatgtagcagttagacaaaataggaagtggaatcattctaaatgattcctattattctgcttggaaacccagtatctccccccatccgtatttctatgcaatgacacaagcctcttcagttccacgttctaccaccatatctcacaatgggtaattaccataggccttgggaagtcttttcttacatctgggcttcagattcttcatctttacagagaaacagctgtaacaatccaacttagatctatccttcaaggatgttgactatggcattgcttataatagcaaaaacttaggagaaatctaaatgtccatcaatggggaaacagtttgataaattatggtacattcatacaacagaagattatacagctgctaaaaaggtaaatttactcagaggtaagtccatatgagctgatatagagaaatgtactttattgagccataatttacatattctaaggatgagtctgtatgcatttttacaaatatattcacctgtgtcaataccaccctgatcaagataaaaaacatttccatcactgaaaatttcccttgtgcctccttttggtcagtttctccccacccacacagaggcaaccactgttttgatttctaacaccatagatcatttctttgttcttcatattttttgaattataggtctttttatattcagtcatgttgcaaggatcagtagtttcctttttgttgctgttttggacatttttacctcccccccaaattcatatattgaagccctaattcctcagcgtggctgtatttggagatggggcctccaaggaagtaattaagattaaattacttaattaagatggtcccacccccaccaccatcactttgtggacaccttagcttggacttcctagccttcagagctgtggtattttgctatggcagcccgagcagactaagacagttgcagagtagtatgccattactcatttgtataccatggtttgtttattcacagtggatggacgtttaggatgtttccgtttttggccattatgtataaaagtgtgaccattcttgtatgagtcttttgtgcatatatgtatatatatcatttctcttgggtatacacctaggaattgaattgctgtgtcaggccgggcgcggtggcctttgcctataatcccagcactttgggaggctgaggcaggtggatcacttgagctcacgagttcgagaccagcctgggcaacaaggtgagaccctgtctcttaaaaaaaaaaacaaaagcagcaatgaaagaattgctgtgtcatatgatgaatgtttgtttaacttcattaaaaactgccaagcaggatcacgaagtcaggagatcgagaccatcctggctaacacggtgaaacctcatctctactaaaaatacaaaaaattagccgggcatggtggcggtcgcctgtggtcccagctactcgggaggctgaggcaggagaatggcgtgaacccgggaggcggagcttgcagtgagccaagatcgcgccactgcactccagcctgggggacagtgcaagactccgtctcaaaaaaacaaacagaaactgccaagcagttttcaaagtagtagtactatttcacacttctagcagaatatatgaaagttccaatggatccatattcttacctacattgtgtattttcaatcttttaaattttagccatttagtgtgtttaatggtctattttgtggttttaatttatatttatctgatgacaaatgatgtggaacaccttttcgtatgattattggatattcaaataccgtcttttaaaatttctttttttttgagacagaattttgctcttgttgcccaggctggaatgcaatggtgcaatctcggctaaccacaacttctgcctcccgggttcaagcgattctcctgcctcagcctcctgagtgcatgcgccaccacgcctggctaattttgtatttttagtagagacggggtttctccatgttggtcaggctggtctcgaactcctgacctcgtgatccacccgcctcggcctcccaaagttctgggattacaggcgtgagccactgcgcctggcctcgaaatgcttttaaaagtcttttgccctttattttttttactgcattcttatttttttttctttttagtttgtacaagttttgataaacagccctccatatctttgggttctgtagtcacagattcaactaatcacagatgaaaaagtttaaaaaaaataaaaaataacaatacaacaatacaaataatacaaattttaaaaatacagtataacaacaatttgcatagcatttacatcgtattaggtattataagtaatctagagatgagttaaagtgtacaagaggatgtgcataggatatatgcaaatactacactgttttatataagagaatggagcggccgggtgtggtggctcacgcctgtaatcccagcacttgggttttggtatccacaggggttcctagaaccaagtccccacagatattgagagatgactgtattctggatatgaatcatttgtcaggcatatatattgcatatattttcttctagtatgtgatttgtcttttcattttttaaaaattatgcattctgaaaaatatgtttttaattttgatgaagtacaacttatttatttttcttttatatttaatacttttgtgtcttaagaaatctttattgccaggtgtggtggcttatgcctgtaatcccagcactttgggaggccgaggtgggtagatcacttacggccaggagttcgagaccaggctggccaatatggtgaaatcctgtctctactaaaaatacaaaaattagccgggcatggtggcacatgcctgtaatcctagctacttgggaggctgaggcaggggagttgctcgaacccaggaggcagaggctgcagtgagctgagatcacaccactgcactccagcctgggtgacagagtgagactttgtctgaaagaagaaaggaaagaagggagggagggagggagggagggagggaggaaggaaggaaatctttgcttactccaaggttatatttgcctgtttattctagaggttttatagttttagctgtcatattaggcctctgatccatttgagttgatttttatgtatgctgtaaggtatgggtagaagtttattattttgcatctgggtatacagttgttacaccaccatatgttgaaaagactgtctcttcctcattaaattagctttggaactttgtccaaattcaattgaagctctatgtgcatttgtctacttctagactattctgttcccactgatctttatgtctatcctcatgtcaataccatagtaaatcttgaaagcagttcatgtaaggcttccgagtttgttgtttttcaaactattttgactattctatgtcattcacatttccatgtaaattttggaatgttggatgtcaatttctatcaaaaaaagaaaaacccaaaacaaaccccaaaaccctgctaggactttagttaggattgcattgaatatatagatcaatttgtggaagaattgataacaatattgagtcttccagtcaatgaacatggtatatctttacaattatttagatcttttaaaattcctcttggcaatgttttatagttttcaatgtatatattttggacatattgcattaaaaatttccctaagtatttgatgtttttggtatttttgtaaaagttattttatttttgcttttgtagagacaggtctcactatgttgtccaggctggtcttgaactcctgggctcaaaggatcctcctgcctcagcctcccaaatgtaaatgttatttttaaattttatttttaaagtcttcattgctactatatagaaatacaattgatttttatacattgactttgtatcttgcaaattttctctttagttctagtagtggtttcatacatttctttggatttctatgcattaaattatgttatctgcaaataaagacagttttattcttcattttcaatctctctctatatagtgtctttttctatatatatatatatatatatatatatatatatatatatatatatatatatatagtgtctttttctcattgcactggctaggacctccagaatgatgttaaacagatgtgagaatgtacatctttgcttttttcccaatattaagggaaaatattcaatcttgcaccactgtgatgttagctgttggttttcataaatgccctttattaggttgagaaaatttcatgttagtccttgtttgtggaggttttcttttttaaaaaaaaatcatgaattactctggattttgttatatacatcttgtgcatttattgagatgatcacatggttgttatcctttgtaattgtgaattacattgattgattttttttttttttttttttttttttttttggagacagagtctcactcttttgccccagctggagtgcaatggtgtaatgatagctcactgcagcctcggcccccccatgtgcaagtgatcctcctgtctcagtgctttgagtagctgggactacaggtgtgcaccaccatgcccagctaatttttatattttttgtagagatggggtttcaccatgttgcccagtctggtctcaaactcctgggctcaagtgacccacccaccttggcctcccaaagtgctgggattacaggcatgagccactgtgcccagccacattgattgatttttaaatattaaccctgccttgtattcctgggataaaccacatgtagccagatgcatttttaaatgtagtgatagatttaatttgccaatattttgtttagatttttaatttgtttcagacagggtcttgtcacccaggctgaagtgcagtggtgcaatggtgtgatcacagttcactgcagcctccatttcccaggcttaaacaatcctcctacctcagcctcccaagtagctgggactacaaatgtgcaccaccatgcctggctagttttttttttttttttttaatttttagtagagacaaggtctcagtatgttccccaggctggtctcaaactcctgagctcaagcaaccctcttgccttggcctcctaaagtactggaattataggcagcagccactgtggctggcctttgtttaggatttttgtctatgtctatgttcataaatgattttggtttaaaattttcttttccttataatggccttgtgagaatttgatatcaggtttctgctgagttgggtattattgggtgttattttatcttcctcagttctctggaaacatttgtataacattagtattatttattttcaaaaattttaataggattcaccagtgaaggcatatggacctgtagttttctctttttttttgagacggagtctcactctgtcacccaggctggagcgcagtggcgccacctcggctcactgcaagcttcacctcgcaggttcacgccattctcctgtctcagcctcccaagtagctgggactacaggtacctgtcaccacacccggctaatttttttgtatttttagtacagacagggtttcaccatgttagccaggatgttctcatctcctgaccttgtgatctgcctgcctcagcctcccaaagtgctgggattacaggcgtgagccactgcacccggccatggacctgtagttttctttgtgaaaaggttttaaatgatgaattcaatttgtttttgtttttgtttttgtttttgttttcagatggagtttcactcttttcacttaggctggagtgcagtggtgcaatcttggctcactgcaacctccgcctcccaggttcaagtgattctcctgcttcagcctcccgagtagctgggtttacaagtgtgcgccaacacactcagctaatttttgtatttttagtagagatggggtttctccatgttggctaggctggtcttgaactcctgacctcaggtgatctgcccgccttggtctcccaaagtgctgggattacaggcgtgagccaccacacacagctgatgaattcaatttttaacaaatataggatgattcatattttttattccttcttggatcagtttcaaaagttttctttttcaaaaaatgttttcatttcctctaagtaattgaatgtattgttgtaagttatagttaagatggactaacaggaaccagatttgcccttctgcctggagtgactaaaaaaaataataataaataaataaataaagtagaatatcaggcaacaatggctaatgacagttgaggttagggagtcaaataagatgagcttcctacaattgccccagctctttgcctagagacagattccaggcctcagaatagggagggaaaacccacatggaagccagcagtttccctgaattgaggatatggagctgggatcctggggaggccaaggtaattagagtttataggacagagtattagggagaatagagcttggataggggtgggagatcaggaggcgaggggaaagggaactggaggaggagggaggggaagagagttctggagacatttggagaactctccttgagtcttcagctaaatacctgtcagtgcgtgcatgtgagaaaaccatgcagaactgaagaaagaacaactgaagagcatcagagagaacgacgccccaaacttacgcaggactgggaataattcctgtttctgccagaatagaaagcctcatgattcagagagagtccccagttagtgtcctcagaagagttttgcctcaaataatggtacaaaattagcccaaaatgctgctttagtctcacctgacaaagcttaatacctgaaagaatcaaactgtctctaagtaacttaatcatatcacaggacaaaggccaagaacatagaaagagaaaaatgggtagtaatttttcattacattcttggtattgtgactgatgtatcatagcgactctggattttaaaaatgtttttctaaagagtgttgaattttttgggggtgggggcaggtagctaaatttttgatgggtcacctcactcttgttgaggtttggttttagtttttgttaaggtggatctatttcagtttcacccttattcctaggccaagcacctgctcctaggacatggtccttatttctacaacgaggtctttctggggggtctctactgaaggccctgtgtgtcttggctctgtctgggtcagaattccaaagacttgccagtattctttttttctttttttttttttttttttgagacagggtcttgctctgttgcccaggctggggtgcagtggtgcaatctcagctcactgcaacctctgccacccagcttcaaacaattctcttgcctcagcctcccaagtagctggcattaaaggtgcccaccaccacacctggctaatttttgtatttttagtagagatggggtttcaccatgttgtccaggctggtcttgaactcctggtctcaagtgatccacccacctcggcctcccaagtgctggaattccaggcatgagccacagtgcccggggatttcaatccttgaaatctctgttcaactgtcagcccttcgtcagctgttctctaccagaccttgtgaattaccaccctgggcacaagcagctcaggatttgtccaggtgcttgaagggaaccgcttcacagatttctgggtttccttttctgcagttccctctgctccatagcccacaagttccagccatcttagagccctgaactctgatctgtctcctccaccaggtccctgttttttctgcccagtgcaacactacaccatggttgggctccactgcctccactacggcttggaaaccaccctcccaggcagaaagccagggcgaatatggggttgccactgctacaaagacacagctcagcacttgcccaatgcctgaaatcagttgcttcctatcttttgttcatgattatggttatttacagttgaggttgaaaccagatactgagtcatggctgaaactggaaaatcgaggatatatttttatttatttatttttagtgaggtaacattcacataacgtaaaattaaccattttattttattttattttattttattttattttattttattttattttattttattttttgagaaggagtctcactctgtcgcccaggctggagtgcagtggcacgatctcggctcactgcagcctccgcctccctcgttcaagcgattctcctgcctcagcctcccgagtagctgggactacaggcgcctgccatcacgcccagctaattttttgtatttttagtagagacaggttttcactgtgttagccaggatggtcttgatctcctgacctcatgatccgcccgtgttggcctcccaaagtgctgggattacaggcgtgaggcactgcacccagccacaattaaccactttaaagtgaacaatttagtggtgttcaacacattcacaattttttttttttttttttttttttttagacagagtcctcactgcaagctctgcctccctggttcacgctattctgctgcctcagcctccccagcagctggaactacaggcgcatgccaccacgtccggctaattttttttgtatttttagtagagatgggctttcaccgtgttaaccaggatggtctcgatctcctaacctcgtgatccacccgccttggcctcacaaagtgctgggattacaggcgtgagccaccgtgccctgccaacattcacaatgttgtgtaaccatcatcacttctatctacttctaaaacattttcatcactcccaaatgagacctgtataaataaagcagccctgagcaacaaccaatcttctatttctatggattcacctgttcttgataattcatataaatggagttctgcaatacgtggacttttgtgtctggcttctttccctaaaggttcatccacattgtagcatgtgttcgtgcttcattccttcttttttgttttttattttaagagatggggtcagctgggcatggcggctcatgcctataatcccagcactttgcgaggctgaggcgggcaaatcacctgatgtcacgagtttgagaccaacctgggcaacatggtgaaactctgtctctactaaaaatagaaaaattagccaggtatggtggcgcgtgcctgtaatcccagctacttgggaggctgaggcaggagaatcacttgaacctgggaggcagaggttgcagtgatctaagatcgtgccactgaactccagtctgggcaacagagtgagactccatctcaaaaaaaaaagagagatgggggtctcgttacgcaggctggttatatgcatagaaaagatgtctttaaagaaagtccattgttaacagggaataccaccagagaatagcaatggagaggaatggggacacttaaaaaaactgatgtagttttgtatcgtttgaatttgttaaaacaagtgtatattagaaaataaagattttaattaaaaaattgggcatggtggcatgtgcctgtggtcccagctactcaggaggctgaggtaggaggatggcttgagcccaggaggttgaggctggagtgagctgtgatggagcactccagccagggtgacagagctgggcagacagagacagagaccctatctcaaaacaaaaacaaaaacaaaaaataaagaaaataaagattaaaaataaaacttgatgaaaaataagggaattttctgctttaaagtttaactttagccttaaccctcaacccaaggctgttcacagctgttgcagcttgccagatggccttgtttttctcatggcttttccagaggctgcagtgtaggtcacttttccaggaggggctgtgaggagagtcctgcctatccctcccctggattccctcgctgccccccatctctgttctcccactactcagaacttcctctagttcctggaacaccttgctttctcgtgctgaagagacttttcacagttttttcactccctctgccaggaattctgtctcagactcatctccttcctgtccctctttcaagctgggtggggtgtccctccctcctctgcacttgtccagtgctctgtgtgatctcaagtttacctcttgtcacaacatattgtgaattgcctgtctgtctcctatgatggtgaactagcaggacagaggccatgtttatttccatcacagcctcatggtcctgtttccaaaggctggcacacagcctggaacatgagaagtgcccactgcacgtgttgaatgagagaataaaggaaggggagagctgtggttctctagtcagaaacccaagcttcagtcatcaactgcgtgtcctggtttacttggcatatagcttcatgcctcatggacatggggctttcaggatctaaagaaaatcctctagaggaaatttccccagatggaaagctaagtagaccgtagatccttgccccttctctcaacagagctgcctgcggattcccaaagaactgatgactatcaccctcccaattctcttggatattattgaaggatcatttccgtcttggaaataaagcaagatggctggtatgtgtgtttttttccctaagcccatgagtctcaaaacacctaccccgtcaagttccagaggtggtgtggctgttctttaaaaaaatgaaaataaccagaaaaatgtattttacctccctgagaaataaaaatttccttgtttccaaaatttccaaaagaaataattaggatgtcctgagtgtccagtatgtgttcctgacacaggaacaccatgaggttgagaggctaacactgagttaggtctccaagcatccttaagaacagtgttgcacaaatgaggtgccacatcaaggcacgagcagaacaacagagctctcatgacatgttattcaggaaggggcccagccaggagagtacatttctccatgagccaacgtccagagcaaagatttatcgctaaacttaaaaaaatccactgtgggttattgttgttattggtgtgaattattataactcttgttatctttggcttgtgtgttctggtatgtctgttttggttgttatggtaatgttggggttgagtgtgtattttacttgccgttttaaaagaaaattctttttgtgggatttatgggactccggtggtaaacaatggctcttgccattttgggtgaaaagggtttcagatgcagggatgattagaatataggagagcttcctgtaggtgagccaccgatcacagccaacctgggggagatgctcaccttggcctctcgcacgcagaccaacaagactactgatgccttgagatcagctgcctcaagtctcatggcagatgagcagaatgtctttgctgaagcacccttgcatcttctgagcacactcatcacctcgcaggtttccagggactgggaggctggcactgcctgcctcccacaatgccccatgtcccagctcagactaaagctgatcacctttgagatttctggagcagccaacatgtgatctggccttcaaagagggctttgtaaccaggggtggaggtagctgtagcctgagttactcttccgcttcttaatatccaagacaggcctgggtgtctcacggtgccaataatattaatattagttaccaccatattgtctctatgagtatttactatataccaggcactctgctgaacatttgagatggaatattttatctgatcttcccaagaatcctatagggtttactcctgttttacaaataaggaacttgcggctgagaggctaagcaacttgcctgagatcacctaacctaactataagtgaagaagacaagatacgaaaacaggcagtagctcccaggcagtggtggacacaccctaaggtgacttccaatgaccatgtccttgtataatcctgtccccttgagtgtggccaccacctctgactggcttcttgtcaatagaatgatgcaaaggtgataaacatcactctcatgattatgctaccctatttatttatttatttatttatttatttatttatttattttttgagacagagtcttgctctgtcgcccaggctggagtgcagtggcgcgatctcggctcactgcaagctccgcctcccaggttcatgccattctcctgcctcagcctcccaagtagctgggactacaggcacccgccaccacgcccagctaattttttgtattttttaatagagacggggtttaccatgttagccaggatggtctcgatctcttgaccttgtgatctgcccacctcagtctcccaaagtgctgggattacaggtgtgagccactgtgcccggcctgtgctaccttatttaaaactctggcttagccaactggagcaagagagagtctcccggtggccataaagaagcaagtacccctgtcgtgaactgccttgtgagggccacatgggaaagattgtgggtggcctctaggacacaagggccacctccagccacagccagtaagaagctggggctcccacacataccaccacgaggaaatggattctgccaataacctgaaggatttgggggcaaattatttcttagttgagcctctagatgagaaggtggcttggccaacaccttgattgcagccttgtgagacgctgagcagaggatccagctaagccgttctcagactcctgacccacagaaactgtgataatacaagtgtgttgttccaacccactaagtttgtagtgatttcttacacagcataggaaacgaatacacagcccacgcatttaacctggccccgtccacatttgtagcaggtcctgtgctctgtgcatgggtcctcctacagagtttccctttgccacttctgggagttccagcctaatttcttggaaaatgaccagagcaagggactcctgggctgctttctgaccaggagacagagaagcagggaacccaggcacaatcaactctgtgtgaaagaaggatcagcaagaagcatgtgaagccctcctgccttgcagcagctacaggcacacagagattgggattaggattaaagctatcatctgaggattggtcctagcagaaatgtgccctaatgatactatgcagtgggaaggggaatattttgggatctgaatctatacttatataattatggggttttttttttttttgggacaaattcttgctctgtcacctaggctggagtacagtggcacaatctcagctcaccgcaccctccgcttcctgggttcaaatgattctcatgcctcagcctcccaaatggctgggactacaggcccgcaccaccacgcccagctcatttttgtatttttgtagagatgggggtctcgtcatgttgcccaggctggtctcaaactcctggcctcagtgatccacctgccttggcctcccaaagtgctgggattacaggtgtgagccactgtgcctggccaattatggtgtttaattgagttagtgctgggcttctagggtgcatttcaccttgactttgagtgctggaatttaaagtgtggtccaccagccacacgcagctggaatggtattgcatctgttggatactttcaatttatctacttcattgagcatggcagtaaaatgtcaataccacaagacagggctgcctgtataattctgcaaaaataaaatgtagccgtatgtttggggactaatacaagtggaaggttcccctgtcatgttggccgtgtttgtgcaatcaggcctgtgcggagcctggtctaacaagggcagccatatgaggccatttaaaaaggcatttccagtctctgccccagtgaccagggacactggactccttcactagttaccacgagaggctgaaagccacacaagggcccgcccagagtgggcctcccctccaggcaaagctggcaccatcctggtggcctgtgggtttacctttactcatcacaacttccatagaagaggaaggaacacccacacccaggctgtggctgggctggggacttggcctgctgggcattggggtggcaattgtgtttctcagcaagttgcctcaagaagcgagaatggctactgattcttctcttataggatccacacagcattcagtccttctactggcaactgaaagggacaaaacacttgcctgttcaaaaaggtcttttgccaagggggtgtggctcatgcctgtaatcccagcatttggggatgccgaggcaggaggatcaattgagcccagaagttcaagaccagcctgggcaacatagggagaccctcatctcttgtttttattaattaattacttaattatttactgactcttcattctggtctgaagggagacctcatctctacaaaaaatttaaaaattagcttggcttagtggtgcatgcctacagtcccagctacttgggaggctgaggtgggagaatagcttgagcccaagagtttgaggctgcagtgagcagtgatcatgccactgcactccagcctgggcaacagagtaagatcttgtcaaaaaaaaaaatgtctttttaggagatgtcagctgggcaagactgtcatcctgctgtgtccagctccagtctatctgccttcctgagccagaatttttttgggagatagagaatcagctgtaggtgaggctttgggaggaatggaagaagactttcttctctgtggattgggtgagaggcaggagatcagcctcagagaacctaagcggaggagcagcccaccagctctggagcgagtttggccctcagaaaccggaggattcctgggctgctatttccacatgaaagccaagtggctagacaggagctggatggctgggctgggtccttgggtcaccatggaaagatggctcagaaacaacagaatttggccaggcgcagaggctcacacctgtaatcccggcactttggtgaggcgggggcggttgaatcactgaggcgaggaattcgagaccagcctggctaacacggtgagatcctatctgtaccaaaaagtacaaaaattagccaggcatggtggcatgtacccgtagtcccagctactcaggaggctgaggcaggagaatcacttgaacccgggaggcggaggctacagtgagccgacatagtgccacactgcactccagcctgggtgacagaatctctaaagaaccaacagaatttgtgccaaatgaaaaagacacaagcatccacattagccaaaaattaataagcacactcaagaagactcaggagggattgcttacaaaaaaaaaaaaaagaagaagactcaggagacgcacaaaacaacgggagtgtgcagatgcgcaaaaactgagagcatatcactcacatccctgtctgtgaacaatagttgagaaagactggcaaaacaaccaacgaatccactacagacctcaggacatagcaagatgaagaagcaatgccctcatcttgctggctcggacaggaaaggtgcgatctcactcatgttccgtgtcccttatgagcacggcagctctattccacatcctcttcacttgggaccctttcggtgtaaaagtccataaatgtgcttttagtgcttccattttgtgttgattattttttctattgtttcttcttttcatttcccgtcctttgaccagttggatccaattcctattcattctgcttctcacctgctcagctaaggaataccactgcactttccatttaaccaagactcacttttctaccattcactaaagaacgcacaattatctactattatttgaaagtgacgtgccaactaagaacgacagaaaagaaggacaggtgtgggtccctggtgactgggagctttcctgtgaacccaagattgcctatttggggcttattttgcaagagagaagagcagcttgcatatttgcctgtggtatatggggctttctattacatgcggcaaggatagattctattgttgaagacatttcctgtctctttctgggtggggggattatgtacctgctttattgaggacagactcacatatgactggtttgggccaatgaaaatttagcagaggtgacctgtgccacttctaagcagaagctttgagaaccactgtgtcattccaccattttctctttttctatgccctgagcccagtaatgccccaggtcatagacacgctgatagcccaggtcccaaagttaatagcacttggagcaaagcagtacccccaccacaacagaacagttaagtgagcaagaactaaatctcgaaacccctgagatttttggaatcatttgttaacacagattatcccagtctattcacactgatacaatagttaaacataattctggcttctggtgttgctgcctaaaatgtattttatttaacaatgcatcatgtcatctaatatttaatcaccattctggacttataattaaccctattttctgaggcagtgatggggacatagggagattaggtcacctttccagaacagcacagccagtaaagggagcagagccagatttcaaactccgaagactcaatctcttgctcattttactgcaaaagctgccacaggggaaatggcagcagcctcactggcaacacaacagaagtgcatgaaggactgtggtttcaaattggggttttctcattcaattccatttttagctagaatggcacatggtggtaggttgctgactgttatccttggagtctgattgacttattacataataaggatcttctagccctcaagcttctcatgcttttaaaaaaaataaaaataaaaaggagccaggcatgatggtgtgtgcctgtattcccagcgacttgggaggctgaggtggaagaatagcttgagcccagaagttcaaagctgcagtgagcagagatggcgccactgcactccagactgggtaacaagagtgagcgggacccctgtctctaaaaaatagtaataatggccgggtaccatggctcatgccggtaatcccaacactttgggaggctgaggcaggattgctttaacctaggagtttgagaccagcctgggcaacatagtgagaccatgtctctacaaaaaatgaggtggaaggatcacttgaacccaggaagccgaggctacaatcagctgtgatttgccactgtactcccacctgggtaacagagtgagaccctgcctcaaaataataatcataaataaagaaagaaaaacgtaactgtcaatgtccaactcccactgccaaactgggcctaaaaatgaatgttcagtataagtattccataccttctgaacccgaggcctgaagaatcagcttcctgaattgggggaggttatcctcagtttcacttttgtgcggtaattctaggcttctggcgggattcaaatctcaggggcgtgtacttagcagaacagcgtccccattatctgggagtctgggacttgatgactgtctctgcttcacactctgctctgagtttggcagaatggtcacctttctcaggaaactcaggcagtcctcagccgtctccctgggagggagcaaaactattcaagggcccctttcatgaggagaaaaaaaataatcatccaaaaacctcacaccagcataaaccaaagtattcaaggccctcttacagatttttaaacaaggctttaaggggaaaaagagaggagatgggaagaagaagagagaagaaagaactcttggaattcgattgagcaaatctggacatgaacaagaaaatggtgcacataccagttgatggtggggattggaaaggctgtgaaaatcattggaagttccacagactaaactttccatttttatcttgacatttttcctacctaagcttttatgcaagtgggtttttggatctccaggctataatttatgtaatatttaatgatgaaaaaaatggatttggaccaaagcactccacttctcaaaaagctgactgattgcctcctgcccctctcagaagttcactttgaaagaggccttgtgtcgctttctgatcaaggctcttcccaagccttatgcctgtactgagttgtacaagttagggaccaccatccctcaacctgggaaaaggcctggcacagagaacagagagaaatatttggtgcatggaatcggtaaaataagggtgtgcaaggatgggctgtggaagcacctagaggtgctgggtatgttggggcatttggtttgctgtctgaattgtggacaagggagtattacagccatgcccatgagaaagatgggagcatttggtttgctgtctgaattgtggacaagggagtattacaaccatgcccatgagaaagatgggtgccataggctggtggggtatcatatcttggtttgtatttggagtaagttttctcagatggcttgaaaagtctgatgctaagaggtatctagagtcctttttttttttttttctttgttctgttgcccaggctggagtgcactggcacgatctcggtttactgcaacctctgcctcctggcctcaagccatcctcccacctccacctcccatgtgggtgggactacaggtgtgcaccaccacacctggctaatttttgtattttttgtagagacagagttttgccatgttgcccaggctggtctcaaactcctgagctcaagcaatccgcccacctcagcctcccaaagtgctaggattacaggcgtgagccaccatgcccagcctatccagagtcttgacatcaagatagatcacagagtcctagaggagtgagattgttgccacctggacagcatgtgaccctaactcaaggatttgtcgcttcatgttcaacctttgatcctaacaaggtacccatgaacagatttaatagaatggtgttcactggcagtaagaagttgatccaggtggggcctggtggctcatgcctgtaatcccagcactttgggaggccgaggtgggtgggtcgcttgaggccaggagttcgagacaagcctggccaacatggtgaaactctgtctctactaaaatacaaaaaaattgccgggtgtggtggtgcatgctggtgatcccagctactcgggaggctgaggcatgagaatcacttgaacccaggagttggaggttgcagtgatccgagattgcaccactgcactccagcttgggtgacagagggagaccctgtctcaaaaaaaaaagtaagaagttgattcaggttagaagcatggatttccaaagaacttgtggacttcataaagacgtaagaaaccccaagatcatctgcaagacttttaggatgactcattaccacatgctgtcctgaaatgaagatgttgtatttggctccctggtatcaaaggcactttctctcaaagtgagaatagattaagcagaggctcgagtcacctctatgtatcagttagttactgttgtgtaacaaaacacccccaaacttcatggcttattaaagcaaacagttcttattcctcacaggtcatctatggaacaattgtggtttcttctggtctgggctagactaggctgtttatggcatggctggctcacgcctctcttgccagctggcaggttggctgggggctggctggtcttggatggcttcactcatatgtttggtgattggctggcttttggctgcagcgatggcagtgactgagtcatgaatctctctgtatctagcgggctagcctaggcttgttcccttggtggtggcagagttcccagagaatgcgtagaagtgtgaatcctggcctcggaactggctcagtgtcacttttacctccattccatcagccaaagcaatccataaggtcagcatgaattcaaggacaggggaaataaactccatctcttgatgggaggacctgcaaaatcacatcatcaatggtgtgggtaaaggcaggtttggagcattggagccatatttgtagacagcctacacaaatgggttggctgtattttcaagatggctgacttgggccagggttacaatgtgtgacctggaactgaggccatctctgtatgaaacgagtataccatagaggaatcagacacatagccctaacctcaatgggcctgtgtccctaagccagcaactgtaggtccaaagtgtttcccatttcaaaatattacctacgatttcttctctcaatacccttgtgagtgtttcctgcattttgcagtaaagggaaccacaaaataagggcttggggctattttttttttgacagatatttctttttgaaataaggtttaaaccaatcaaacattcttctttggaaacaactgattgcaatatttctacgctatagtttcactgattcctgctgacttcctaaggtactgcacacatggaagaggtaaggagagtaagccaagctttgtggtttaaaggctataaatcaaattttgtaaatctagggcacaaatgtgacctactaaggactgtagtgaaccgtggtgccccatccagttattgagagcaaggctttcaagcattcaacttggctgtatcagttggtcttgaatcatgtccttgaatatgtctagagccgcctacacagacccatgatgctgccatctctgggagaaaagaagcagcattcgtgaggtggctagattccctgatcaatccaccccaccccatggtgatacaataaaaaaaagaaaagttgcttcttaggctgggcatggtggcttgcgcctgtaatcctagcattttaggaggccgaggcaggtgaatcgcttgagctcaggagttcgagactaacctgggcaacatggcgaaactccgtctctacaaaaaatacaaaaattagccaggtgtggtggcgtgcacttgtacttccagctacttggggggctgaggcaggaggatcgcttgaacctgggcggtcaaggctgcagtaagctatcacaccactgcactctagcctggatgacaaagtgagaacctgccttaaaaaaaaaaaaagaagtttcttcttactgaaaagtcaatgtggcaattattgctggttacttacccaatagctgttccttactgcccccacacactttgctttcttccaggctaacagaaccctaatttggtttcagtacaagtagcaatgcgttttggcaagataggaccctccatttccccagagaatgaactgtgactggtccaaggtaaccactgtactccctttttcctgtggtaatgactggtttcagggtggacatgtgacctaattctggccaataatactaagagggagtctgccaggggcttctgggaaagatttcttcttgataaaaaagagaggtgaactaagagaatccttcatcccttccttcctgcttttagactttatttctagatgaagaaaagtgatgtttggagatgtcgcagccatctcatcaccacaaagggagggctaagagaatctctcagaaatggacccgagccctgacattgtgatgctgagccagcctggaaccagggatggagtgtagccggaagtatgatccagcagcaatggttgtttaaggctaggctttattctgactggtcaggcttcggttctcatttgtcaatgtctgggacagattggttgttaagtatttcgaataccccttggttggaatcagtgcctctggatttattggtatgtaatgaaaataaacacttttttaaaaagcacttaactggatattcagttacttgcagccaaaagctttctaactacatagtttgggttcacagaacccagtcacatctgaactgcatctgtggggacttcacttgcacagctttgggggactgcagccctgttagcatctatctcattccttcctcaccaccactcccgccccctacccattgttaggtagcaataatgtctttctgtgtttattttttatatcaggtggtggtgggagggtaaaggcaaactgtctaatatctgtggcctggaagagaaagctattgtagctctatcagtgtactgtatctgctcttcatggaagagtcgagatagaaatttatcctctctggcagaatgtaggagatttagctaacttctacctaatctatccatttgctcttttgctataccatttgattagccatattgataatgtcttttttaggaatgaggcttgggtagccatcagtcaaccagtcaaccaatcaatcttgttgatgcatgccatcggtaacaagagaagacttcagggagagggtctaggggcacactcgctgctttgcattgtaatttttttttctgtgtccatcttccctgttagactatgagcaatttaatggcaagaacggtatcttcaatctctgtattcctaggtttagcacagtatctggcccatacagggtgcttaatagatgatttgttgaaagaaaaaaaataatgaatcacatatgaaattattttaaaatgcacgttctaccaagacaagatgatttttatggacacagaaacaccttcctatgtggccagcttaaaaaaagttctaattagggatattggaatatcttatcccattttaaaaccaacacattcagaaatacaatcaaagggaatcagcctatctttccacatgctttttgtggcacagtttgtgcctagaaagcctttttttaatgggaaagatgatgtttcttaaagcatctcctactaaatatggtgacaagaaatggaaatatcattctcagggttaaaaaagatttttcatgaattcactaagtagtgtgtttgaactaactttaaaagctgacttcgacaaactagataaaatatacttctatctctgctaaccatctttcaacatgtcagctcatctgaggcctccctgagatccatgagagacagcgtgtaagctgttctttagatggccatctaaaaactcatcaaatagcaaggtatgaaaaacaaaatcacctccaaaacgttcaaattgcattgatctgtggcataaaaccctcaccacaggaagagaaatgatggatttgagacccgcaggaggattcgtttaaagtgctttgtgttgtatgtgtgtgtgttttattttaatttatgtatggaattgcccgggagtagtaaatagactttatttgctatatttcgaggaagataaaattatcaggactgtctatgtatttcaaagccaagaaaaacaaaaacagctttgaagcgtctcctggatttttttgtcctaatcttctaagagatggtcttgataatgtttattcttttcttctttctaaactgattgaaagtaccatttttctcagttaaaatagcaatctgattcttaactaggtcaggtaaagtacccattgagcagcacagattatttaaacgattgcaaaagggcaggtaggaatttctgaatagcattgccacacttctttccaaatctctctcctctccttctctctaagcttgtgtggctcccaccgggaacacaccctggtctttgaagggtgggtttttcatttgaattcatacccaccatctggacaagtttttctgctgcatttcccctataacccaaagagtgaagccattttccatctgcttggagataatgtgtggagtttttctttccattggtgggcatggggaaggagatacgcacactgtattataacgcagccagtgatgatggagaggcagggctttggtttaaattttacatactcagaaacatccatttctgacaaaatcccatcttgtgaatcccccatagcctggaggagcaattggcaaactttttctgtaaagggccagatagtaaatatcttaggctttgtaggacatttggtctctgttgaaactgctcaactctgcacaaaagtggccgtaaacaatatggatttgaataggcatgcctgtgttcagtaaagctatgtacagaaccagacagtgggtcctggtccctggctcagagcatctctccatgcttcatgttggaggcccacatcttggttttctgcaaggtggcattctatctgctctcgtgaggagggggtgagcccagcaatggctcagatccacttaggcaagaccataccgccaccctacctgtgtcccaggacacacttgtgcccagtggagacctggtgagcattatagggtgtaaaccctcaaattaatgagcttgccagctgcccttgttaaggccctgagtgtcccatctcagtcacggtgaccatcttctccctcatcacatatttcattctttggcctcttctccacactctcaactagggctatctttctaaagtactgtttggtcgcggagctcttgtttgaacaatgattgatgaagaaagtccatcatgtctaatcacagcattcaaggctctttataagctggcaccagggctgacttattaggcacggtaggtatagtagttggggtccatgatacttttaggtcctcaagcatgttttaattttaatttcctttaaagtacaagaaaaatgagtacaataatagtaataatgagtatataataatgaatccaggctgggttacgttgtctcttttttctttttcttttttttgagtccgagtctcactctgtcgcccaggctggagtgcagtggcccaatctcgactcactgcaacctctgccacccaggttcaagcaattctcctgcctcagcctcccaggtagctgggattacaggcgcctaccacggccagctaatttttgtattcttagtaaagatgggggtttcaccatgttggccaggctggtctcaggctcctgacctcaggagatctgcctgcctcagcctcctaaagtgctgggattataggcgtgagccaccacgcccggcctatattctttttttaattaaaacaattttttttagagacagagttttgctctgtcacccaggctggagtggcatgatcatagctcattgcagccttggactcctggactcaaatgatcctcttgctgcagcctcctgagcagctgggaccacaggcatgcatcactatgtctggctaattttaaaaatttttttgtagagacaagatcttgtggctggatgtggtggctcatgcctggaatctcagcactttgggaggccgaggcgggcagatcacttaaggtgaggaatttgataccagccaggccaacatggcgaaaccctgtctttactaaaaatacaaaaaaattagcaggcatggtggtacaagcctataatcccagctattcaggaggctgaggcaggagaatgggttgaaccagggaggcagaggttgcagtgagctgagattgtgccactgtactccagcctgggtgatagagtgagactccatctcaaaaaaaaaaaaagagagagacagagagacagaatcttactagttcaagaccttgcttaggctggtcttgaactcctggcttcaaacaatcctcttgccttggcctcccaaagtgctggcattacaggcatgagccaccatgcccagcctatattcatctatataccagtgcagttgtaaatataacttttttttttttaatagaagaaggggcccacaaaagcaaaaggacttgaggtcctttctaaggactgccatatgaaatatggaaggcccggttacatttgcatttcagatcaacaatgaataatatctttgtataaatattttgcaaatattgcatggggcacattcgtactaagaaaacaattgttgtttatctgaaattcaaattaactgggcatcttgtattttttatttgctaaatctggcagccctgcaggaaagtcataatgtggccctggctggaatgaagcacagttgcaaccttctctctcgtgttcttgaaggtaagtgtttaggtcaggttccctggaaacggaccctaagatgaggatttatgtgcaagtaattttttctaaagaagtgctttcaggggagacaagtaggagagtgagggaacagtcagggcaggacaggcaaggaggcaaagcaagggtgagtctcacgccagtcgttgtagagggtagcttcagcctgaccccatctgggtcactttagaaatgtcctaaaggatatctggggctgggtacagtggctgacgcctgtaatcccagtgccttgagaggctgaggcgggcagatcatgaggtcaagagatcgagaccatcctggccaacatggtgaaaccctgtctctactgaaaatacaaaaattagctgggtgtggtggcatgcgcctgtagtcccagctactcgggaggctgaggcaggagaatcgcttgaattcaggaggcagagcttgcagtgagccgagattgtgccattgcactccagcctggtgacagagcaagacaccatctcaaaaaaaaaaaaaaggatatctgggcagaggattgacattgttgtctatactagactggaaacgtggctggtccaagttcaaagcttagagagaataatcactctgcctctgttgctagctttcatttggctttacttcctaacctgtacataagcagtgcaaaggagaatgatgaaatcaagcatatataatggcgtgaaagaaggcagctccctcatgctggtctgtacctcacactggggcatcagtacctcacagaggaggtctgtacttacagaggaggcctgggcctcacagagaagcctggacctcacagaggccggcctgaagttggcagtcccagcagcttacacaatggaagggatttgttacttcagaggagcagccttgctatattttatacctttttattgttgtccaggagaggctcatacctcacagaggcattatgtcagaacccaaggatctgccttatcatgaaaataatttcttacttccacccctctgtgctttaacccttactgcaccatcaaggttatcccacagttctgtgggctgaccatagccctgccttgtcaccagcacaggcaggagagggcattttgatgaaccatgagagatagggatttgacattctgactgccctgtccactgggatgctttctcctacctccaagcccaagaggaacacatacttttctgggtacctcggcacacctctgtcactgatgactcctgctataaatgttcacatgcacatctgcccctgggcacctgtgacctctgcgctggcagggattgtgttttattcatttggttttccccagcacctagaccatagtagcccctcaaatgtttgctgtataaatacatgaatgaatgaatgaatgaatataggaatttaatctgcagctttgcacaagcaagcactgcaccacaactggccggcactgagttactgtaggtaaagtgtgtgcatgcaagtagaggcaccaaaaaatcagtaggaaactgaaaaacagagtcttgtatccaatggcatcaagcttcatcctggtggagcaaggtgggtatcagcagtcccatccgctggagatgctgtcttccacgtgcctgggccgcagactgaggcctttccctaacctgcactggagtgtcccgtttgattgatggctttatttctacctccatttccaggaatgggagcctggtcctagtccacctccatttactggttagggcctagactttgcccaactcctcaccaacccctttcttctggaggcttcctgtggcttccttgcatccccatctctaaaacatctggacctgatgggcaatagcctggtgtgaagagcatcgggaaatctcatggccaaatcggacccccgtggccttggatgccagcctcaatcagatctacattcgaagtgtctcctgcctttccttccccaaagcctcctgggcagcctactcccacagccagaggtgggtggggaaggcgagggccccaatgctggagtggacatttttgggtttggatcttgactctgacactgaccagctgagtggtcttgggaaagttatttcatctcagtttcctcatcagtcaactaataatacgatctcatcggaaagagagaattaagtgagatcacttagcagatacacaaaaccatatcaattcttttcccttatgctcttggacccctacctcttcctaaatttcttcttctccacttatctttgaaatgcaggattcaaagtgccttgcagtctgagaaagagccagagagacgttctccttgagtcctactctgcaaccaagcctttccgagtggctgctctcttgtatactggggaagggaggatgatgttaaccaaaaggacccagcagcagacatgaggagcaacaaagcacaagacaagcacacagagcacaagttgctgaaaagggcacagacggcacagcacattctgcccaagctggagagacaaacatgattagaaagagatagaatggaatacactcctgacgtcagtgggcaagaggggacgaagcaataaagggaaaatgctgtaaaggaaaactggaatttcattttcacggttgattctcaattactcaggcttggtgggaggctacacttgtaccaaatgtagcacccagagtacgtggccgctcctcttcctggaaacagagtaatggttgccattcactttctgatctattcagtaagtccctggtgggatccttcagaaagagaaagggcgacatccattatgctgctagtttcctgccctttccacttgtttccatttctatctccttctcttcctgccatttaccacagccaagtacatagaatgacaagagattcagtgatggttgtcctcaatttccagtttaattcagattgttttctgtggaaaaaaaaaattcccaaggctgatctttctttctttctttctttctttctttctttctttctttttttttttttttgagacagggtcttactttgtcacccaggctggaatgcgttgggagtgatctcggctcgccgcaaccttcgccttctgggttcaagtgattcttctgcctcagcctcctgagtagctgggattacagccacccgccaccacacctggctaatttttgtattttcagtagagatggggtttcgccatgttggctaggctggtcttgaactcctgacctcaagcggtctgcccgccttggcctcccaaagttctgggattacaggcgtgagccactgcgtccagccccaaggttgatctttcaagaagaatcatttagttactttttgtgttgtttattcccccagtatcacctataatatgttaatcacaagaggggatgcaggaggagttaagatgagctacttagtccacatagtctggtaagagagtcagggatgtagacaaatgattctaggacaagatatgctaaagctgccacaaagggctgttcaaagtgctatgggaataccaagaaatgagtgactgccagtctcaaaagagaaactgcttgagctgtcttaaaggatgaacccctttgctcagatttacagatggtcagaaaacattccaaatggagagagcaattcaacaacggttcagatgcgtggattggcctaacttatgggagaatttggtttggctagaatacaaggtatttgggggaagtagcaagagctggagctagatagcttagctgaagcctgattactgcattcacaaatatttactgagcacctgctatgcaccaggggccgttctatgtgcttgggacagaagaatccttgagagcaccatgggccctgccatctcagggcacactcaccataaggcctgcaaagggagagaagcaatcagttgccaaaccgggaagtgcctttcaacgctgtgcaagggaatgctatcttactgcagtagaagctcagggaccattgaaagattttaaataaaggaatgtaatgctcattttgacactgtagagaatccatggaacatggagtgaagataagtaaaactggggacaggggactagttaggaggctactgttataatctaactggcatatgacaaaaacactgagctaagcaggagaggtgtttcaggaagtgacctggatagacaacaataacataatagcaacctgatagctgctcttaagcaaagagctctctttttaaattattgtagtaaaatacacataacataaaatttaccatttaaccacttttcagtgtataattcagttgcatttgatacattcacagagttgtacaactatcaccactatcttgttccagaatattttcatcaccctgaaaggaaactccatacttacaaagcagtcactccccattcccctctccctcacctcctggcaatcatcagtctgctttctgtctctatagatttgcctaccctgaatatttcatataattagaattatacaatatgtggccttttgtgtctggattctttcacttagcataatgtttgcaagattcatccatgtcatagcacagatcagttactgcattcctctttatggctgaataatattccatcgtatggatataccatatttcatttatccattcttaagctgatgaacattcagattgtttctaccttttgactattgtgaatagtatgtgctactgtgaacattcatgtacaagtttttgcttaaacacctgttttcaattctttggggtatatgcccaggagtgaaattgctgagacccctctttttaatttataacttttagttcccaggaaaattcattttttagaaaacttacacaaaagctttgttcacttgctgggggattatgaatgataggggagtatttctttcagtttgtaatttcgctgggatcagtttcaacactaagcttttgctcagggcctgcctgactctgatctgcaagaagtgatctccagctggggcctgattttgttgaagtggccacagaagcaaattgtcatgggctccttgatctagagacatatggtcgaatttcttgaccaaaatagactccatattgtctgtcctgatttcctgtctgggttattcaaggaaagcctgaggggaccagtgttgataattagagactctcagcttctgacctcagcacctgcttcaggatttaggatgattatcattctttggccatttgaaggacaaatgcaacactatttcctccattagccatagtatggtcttttagaatgactaaatgaagtttagagataccttagccactttggttttatgtgtgaggtgggggcatgataaatgctgtctgaatttttctagctgtactgatatggcctagtggaaataacatcttctctggtcctgaccaagctgaatttgaattatgtcactttgtaactatatgaccttgggcaagttatttaaactctctgagcctaacatccctcatttgtaaaataaaagtaataattccatctgtaggtagatgacttgattttggctgaggccccaaaatactgagaaaaacgaaagtggcaagctttccccctttgcaaaaaataagatactagaacacatttgcaagtctatggagccatcctggaaccagttctgtgacccctagctctgtccacctcaaagatatgacccaggctgaagtcataaagtccagaagttgcaattaggtttcttggaaagagttgtcagtgagataggagttttattcttttctttagagagagctaagaaatgttttcctttcactacaagtttagtgagaaagctccatagaaaccctaattcctaaaatcagaaataagatgaggatgtttgcttcaccattcctatctaacattttattgaaggttgcagccagtgcaataaggcaagaaaaaagaagtaaaaggcatatgcattgtaaaagaagaaatacaactatttctattcaaagatgacataattttctacacagaaaatctcagagaatctgcaaagaaagctacaagggccaataaatgagattagtaagattacaagataccaggtcaaaaaccaaaaatcaatcgtatttttatacactaacaacaatggggaactaattttttaaagtattttttaacaatagcgtccaaagacatgaaatattttgttataaatctaatacaatatgtataagatctagatgttgaaagctataaaacactgatgaataaaaaagaaaagctaaatgagtagatggttggactggaagactcagaattgtcaagatggcaattcttctcaaactgatctattgattcattgcaattccaattcagcaggatttttttttgtagaaatagacaagttgattctaaaatttatatggaaaggcaaaggaataattttgaaaaaggtcaaaatttgaggacttgcactataggatttcaaggcttattctaaagctagagtaaccaagatgatgtgatattgtcaaaagaaaatacacagatcaaagaaatcaaatagaagtccagaaacagacccatacatatataatcaattgattttcgacaaagacacagacaagccaatggagaaaggatagttttacaacaaatggtgctaaaacaattagacatctataggcaaaagtgaaccttgttctattcattgcaccatgtaaaaaaaattaactcaaaatgagttataaactttaatgtaaagcccaatgctataaaagctctagaagaaaatgtaggagaaaatcattgtgatcttgggttaggcaaagattctgtagttacaaaactaaaagcatgattcataaaagaataaaatgctatattagactgtgtcaaagttgaaaacttctgctcttcaaaaggcaccattaagagaatgaaaagacaaattacagactgggagaagatatttgcggcacacttatctgatccatactatatgaaaaactctaaaaactcattgattaaaaaacataatttaaaagtaggcaaagatttgaactggtgcttcatcaaagataatatatggatggcaaataaatagataaagagatgctcagtgtcattagttattaaggaaaagcacattaaaactataagatactgctctacatttattagattggctaaaataaaaaattggcaatactaagtgctgacaaagatgtgggacagctggaactttcacatagtgctggtggatgcaaaatggtacagctacagctgctgcggaaaacagtttggcagtttcttataatactatccagcaatccttttttttttgagacacagcctcactctgtcgtccaggctggagtgcagtggtggcatgatctcggctcactgcaacctccacctcctgggttcaaacgattctcatgtctcagcctcccaaggagctgggactacaggcacacaccaccatgcctggctaatttttgtatttttagtagagacagggtttcaccatgctggccaggctgatctcaaactcttggactcaagtgatctgccctcctcagcctcccaaggtgctgggattacaggtgtgagtcactgcacctggccattatccagcaattctaacatcccattcctaggtacttacccaagtgaaatgaaaacttgtgttcacacaaaaacctataaaatgatttttttagtgactttattcataattgccaaaaaccagaaatgacccaaaatcccatcaattaatgaatggataagtaaactatggtacatccatacaaggcagtacacctcagcaataaaaatgaacaaatgactaatcctcacaacatggatgaatcacaaaagtgttatgttaagtgaaagaactcaatctcaaaggctgcatgttgaatgaatccatttatatgatattctggaaaaggctaacctttaggggcaaataagagaacagtggctgccagggcctggggtgagggaagcagtggattataaagagaggtgaagaaatactggacaaggatgaaactattctgtatcttgatggtgggggtggttatattactgtatttaatttgtcaaatctcatagaactctatactaataaggtgaattttactgtatgtgaaatgtgcattaattaaaataagcatagttgagtgtaaaagaaaaaagaggtgggcgttggagggttgacaatgaaaacgccaaacattgggaattattatagatttctttggagagaactgcggtgtaatgtcagtcccattctcctcttggcagaaaggagggcatgttttttccttacctcaagcctaatgagagaaacactgaatagatcacccactaagagagttcaatatgtgccctatgtgatggggagaacaaagaggttggaatcttagctcaagcttggaagagaaggaaaagtgtttactggaggagagggtggctgcagctccctgtggcagaagaaatcactgtgtttgagccatcattgcaccactacaaaggtcaaaagtgtgctcttccaaataactcaggaagggtggggttgctttaaaagaaccctgcccactgaacttcttgcatggagcaaggagacttcagcagaaaaaggtggagggcatactgtcaagtgcctgacggagggggagggagatcatagcagttagcctacgagacctcctacctgggttaaaggatgcagtcatagggcccaggaggggaacttccagcatcccatgctagccctgagagaagagtcagctctaggcgtctgacacagccagtaccatgactagcccagactcttcctgcactgcccccaccccccataatcctaggggagccaaagagagccaggcagggagagtggaggtcccaggaggcaccctcaagggtgagccatcaggcaaaacttctatggatttctggaagctccagtccagggaatcagtttccaaaacttagtaaaaggaagatgaaatataatgaaactcattatttttttcctttagataaacatgaattattcactaaagatctaaattctgatttattacagcttcagatttatcagggagaaaaagtgtggggtttttttttccccctttttgtctccgtctctggaggggaaatatgacctcaccgtgcttagcaatacaaacactaagtgtgatggtcacctttagtcatggaagagggtgaactgcctatgggccagggtgctaaacagtgtggttatttacatagttctggagttggtcgtgaatgctaatgctctcatgcctctgctgcctgaatgtgggaattgtcctctccaatggagagaaaaatatatgaccttttgtgaagatcttaatgtcagctgttacattcctttcaaagggcgttagtggtctaattaacctacctactgattctgaaatctgaccttcacaagacagtgaggtggtgaagttctctctgaacctggttggggaggggtaaggatgagatcgtcctgtggccaaggagttaaacccaaggatgggtttgattgagcccatggcttggttgaggtcctgtgtatgttattccttttgttccaagagctgcattaccccctcatgacaagtcgctgttggaggtcactggggcaccaagagcccagccgaagcaggtgactccaaccctcagagacagagggccctcaagtgtctgagctcactccactgcgaagactgcaacattgctttgttaacctggggagtgatgtcagatttaattttgctgtcaaaggcttcgtaaacctcagatgaaatgtattccagaacctaaataattcttgctgttgttattgttgtccctgagatcaggtcttttgtgataatctttcatgacactgggtacaaccatccaacccccccagtgaaggatgactggcttggtcagtgttggcatgaaggtaatccatgactctctctctctcttagtgtaaacatatcttcccggagatttggcttcagacttaggatgggaaaaggaagaaagtgaaaaacatctcactttaaacatatactgagtgctatttaagtgcaccctaaatacccgcatctactttattattttaatttaatttgtattattattatttttagaaatgagatcttgctctgtcatgtaggctggagtacagtggtactatcctagcccactgcagcctcaaactcctgggctcaagtgatcctcctgcctcagcctcctgagtagctggagtaacagttgtgcaccaccatgcctggttgattttttttttttttttggtagagatggggtcttgctatgttgcccaggctggtcttgaattcctgggcttaagtgatcctcctaccttggcctcccaaagtgctggaattacaggtgtgagccactgtgcttggcccctccacatttatttcagccctcatcactcaactggtataatacttactgggttaggggcctgtacccctgtatcagctaggactcctttttgcaagtgtgagaagccaagttgaggcttctgtaactgaaaagacgagacagtgagaaatcttcaggcatggctagatcgaagggttcaaatcatggcaacagtactcagtctccaactttcctcattctgcttctggttggtgtcattctctacaacagatgaccctcccaaatctccaggattactttatctctatagccaacagttccaatttgagtgagaagacagctcattttccccaaaactgacaaaaacaacgaccacaaaaaacaaaaacaacaaaaaaagccaaccttcagacttaaatcctattggtctcttaaaggtcacatgctcacgtctgagccaatcagtgcatccaggagcttgagtggccaggcctgggtcaacctctcagtcctcggaccaggcctgggtagtcagttccaactgaactgcggggaccaaatgtgagaagggtggttccctgaaggaaaatccaggtgttgtcatccaaaaggaagggagtggatgctgggcagaaaaccacaactgttaagagcaaatcttggctctgcctttctgagctctttaagcttgggcaagttactaaatgttgctgtgctcaatttcctttattttttgagacaggatctcactctgttgccagggctggagtgcagtggtgcaatcacagctcactgcagcatcaacctcccgggctcaggtgatcctcccacctcctgagtaattgggattatggacttgtgctaccacactgggctaattttttgtattttttgtagagacatggtctcactacattgtccagggtggtctcgaacttttgggcttaagttatctgcctgtctcagcctcccaaagtgctgggattacgggtgtgagccaccatgcttggccaatttcctcgtttttaaaattagggaaatagtagttcataagattaaatgaggtgatcaatgcaaagtgcttaatgcaagcagtaaacagttaaatgtcatacgttacaataatatattagctattgtttttattatgaaagctccctgatatataataaattaatctaatatattaaagaaatctatttctggtgtctagtataatgcccaacacataggaaatatgcaacaaatggctgtgaagtggatgaataaggactctcaaaactttgaaatcatcatgtcatctctgactataaagaaacaatatagagaatttaggataattttattttattattttgaaatatgtcggacatacagatgaatgaatcaaacatgtaactacatcctaaagaagaataatgaggtgacacccaagtgagtaccaaccagagatttgcagaggggtcttcaccaatcattgaaaaattaaccaatagaaacagaggtgtaaataacaagtgattgaattagcagatgaggacattaaaccgtgattacagctagacccccttatccatagggaataagttccaagacccccagtggatgcctgaaaccacagatagtaccgagcaaaggcagataattttttattttctttttgagagcatgtgtgtcctttgctgtgtatactacacctggctatatcatatgccctgcagtattgtcacatggcaacagagctaatctgtccttccatgttttctgccctggtacttcctttgcacttttatgaatgtaggttctattgcccatcttctcccagaaaatccagatttcattgcaattgaagacttgctttggagggtatcctttctcgttaattaacttcttcaactttgccagaaatgtggcagcaacttcttcattggcagatgcggcctctctagtagtatttctatttttcagtccaaacctattcctggatctgtttaaccatccctcacttgcagtaaatggctcgttgtcgctcatttcaggggatcccttgctgaagtctttgtatgaactcaatgctttctgctgcaacatgttgccaccaatcaggacatgtttctgttcgtgtcttccacccacaaatttaattcctttttcatcttaactaagcacttaccaggcgctgtggccgtaacttttgtagtttgaggtgcaacagcaaaactagcatgaatctctttttccgtcttcacaatttcacggatagaagattcattcttaccataggtcttagcaacctcagcataaaatttttttctttccttattaagtcaagaactttcatctttttcactcaaaggaagtactttatgcttctctttggcatattggaattgctagcaacactacccttgcactttggggccattattaagtaaaataaaagttccttgaacacaagaactgccgtacctatacctgacggttgatctgataaccgagcaggctacccagtgactagcagggtgggtggtgtagatggcatggatacactggacaaaacgatgattcatgtcctggccggcacagagcagggtggcgtgagattttatcacactactcagaacagcgtgtaccttaaaacttatgaattgtttatttctgggattttccatttaatattttcagactgcaagtgatcatgggtaactgaaaccatggaaaatgaaactgtggatgagggagaactagtgtataaatttgctccagacgttaagacatgtggaggagatcatgagcataatggggagagaatggaaggcataaaaaaagaaaacaactacagcttgggcgacagagcaagaccctatctctaaaaaaataaaaataaataaaaataaatttaaagcaaccaaatggaactttaaaaagtataaattaaaatacctgaaatgaaaaatatatcgaatggctggtctggcatgcaaggagcttagcagtcagcactccatcctagacagcaagtaaaagctttataaactgaaaaatcaagtcttctagatctgtcaaagaagtgaggtcctaaggcaaactgccatccccgaaattagacagacaaacagatacagagaatcacaacctaccagagcagaaaccatcaggagccagcactagggtaggaaaacctaaattataattgacaaattcctggagggtcagtagggacaggtctgaaagttgaaaactccaggggaccctgtgatagaggaacccccatgcttttgtagttttacctgcaggagcactacccggacctcaaagtcaatatcggacaaaaactgcctcaagcttctggcagaaggaagagaaaggacccatttttaaatgtgccagagcattctgtgtgtgtgtgtgtgtgtgtgtgtgtgtgtgtgtgtgtgtgtgttgttcctttcagatccagatctacagaacattctgttgttcctaacaaggcctaccctcagaagtaactattttaccagatcctaacctgctggggtgtatcagagccgaacctactcggagaaaggaaaatgctcaactctggctgcttttagccatccacatggcagaagggaaatacccaattccagccccatctagccatcctgtcccacataaggagttggggttggagacatctgagaaacaatggtgaaattcacagtccaggggcaaaggctcaccaaaagacaaagacctaactataaaattatagaagtcttcccctccctctgccataccttacttctatattactttttaaatattttattttatttttttattttagatagggtcttgctctgtcacccaggctggagtacagtgatgtaatcatagctcactgtaatcttgaactcctgggctcaagggatcctcctgcctcagcctcccaagtagtaggactacaggtgcatgctaccatgcatggctaatttaaaaattttttgtagaaacagggtcttgctgtgttgtccagccgagtctccaactcctggcctcaggcaatcctcccacctcagcctcccaaagcactgggattaaaagatgtgagccaccatgcttggctcacctctatattactaaaggtctatttagtgcagttccttttacccagtacatcacgtccaccttccaacaaaaaattatgaggcacactatgctgggtagagtggctcacgcctgtaatgccagcacttggggaggctgaggtggggagatcacttgaggtcaggagtttgaggccagcctggccaacatggtgaaacgctgtctctattaaaaatacaaaaattagctgtgtgtggtggtgcgcacctgtattcccagctacttgggaggctgaggtgaaaagatcgcttgaacctaggagttggaggttgcagtgagccaagattgtgccactgcaatccagcctgggtgacagagtgaaactctgtctcgaaaaaaaaaaaatacaaagtgtactaaaagacaaacaaacaaacaaaaaacctcatcatttgaagagactacacaagcatcagaaccaggatcagatatggcaggaacattgaaattatcccacgagtaatttttttaaatgatgatgaacatgctgagggctttaatggaaaaacagacaatattaaagaacaaatggataatgtaagcagagagatgaacattctaagacagaattaagaaagagtgctagagatcaaaaacactgtaacagaaatgaaggatggttttggtggactcattatggctaaagatgtggctaaagaatgattctctgagcttgaggatatgacaatagaaacttccaaaagtgaaaaaagagaaaaaaagacaaaacaaaaccacaacagaatatccgtgatgagctgtgggaccactaaaaaaaggaataacagacataatgggaatttttgtcttccacaccttctttgccttttgtggtattaattgaaaaccttatatgattccattttcccttctttcttagtcatcaattttacttcttttttttttaacttttcttcagtagttgctctagagtttgcaatatatattcacaactaagccaagtctatttatttatttagagacagagtctcccgctgtcatccaggttgagttgcagtggtgtgatctcggctcactgcaacctccacctcccaggttcaagtgattctcctgcctcagcctcctgagtagctggtactacaggcatgcatgaccacaaatttttgtatttttaatagagacggggtttcaccatgttggccaggctggtctcaaattcctgacctgaagtgatctgcccatcttggcttcccaaagtgctgggattacaggccagctactgtgcccagcctcaaatcacttttattaccattatactgcttcatgggtagtatatataccttataacaggaaaatattcctaattcctccctataatcctttgtgtccttgctgtcattcatttctcttatacataagcatatatatacaaagcgtatatattcattgtggctattattattttgaacaaactatctgttagatcaattaataataagaaaaataaaacttttcattgttttcctcatttattccttctttgatactcttcccttatgtagattcaagtttctgacctacattatttttcttttctgtaagaacctcttttaacattccttcaaggcaagtctactgccaacagatttcctcaatttttatttgcctgagaacatccatattcctggattctgtgtccatggattcaaccaactgtgggttgaaaatacttgaaaaaaaatggatggttgtgtctgtggtgaacatgtacacacttttttcttgctattattttctaaacaatacaggataacaactattcacttagtatttacattgtattaggtattataagtaatccagagataatttaaagtatagtggagaatatgtggaggtttacacaaatatatagtggaggatgttgtgtaggttgtacaaatactataccctgttatataaggggcttgggcatccttggacattggcatctctgggggtcctggaacaaatcctccatggatactgaggggcaactgaacttgggtataaatccaacaaaatatgtgtaacattattgaaacgacaaaactctaagctggtcggatggtagtgggttatcagaacttattaacactagtgtcactaaagtttggtattttccatatttatgaataggaaacttcaatattatcaagatgttaatgcttcccaacttgacctatagattcaatgcaatcccaatgaaaattccagcatgttattttgtggatataaacaaattgattctcaagtttatagagagaggcaaaggatctagaacagtcaactcaatattgaaaaagaacagagttggaagactaacactacccaacttcaagacttactatgtactgtatcgtttacttaccatgaagctacagtaatcaagacagtgtggtattggtgaaaaggtaaacaagtgggtcaatggaacagaatagacaccccagaaatagacacagtcaacttatctttgttaaagtagcaaaggcaatataatggaacaaggattgtcttttcagcaaatggtgctggaacaactggatatctacatgcaaaaaatgaatctggactgactttatactctccataaaagttaactcaaaatggatcatagacctaaatgtaaaatgcaaaactaaaattcctagaatatagcacaggagaaaacataggtgacctcgggtatgtcaatgacttcttaggtacaacaccaatggcacaattcacaaaagacataattgataagctggatattattaaaattaaaaacatctgctctcccaaagaaaatgtcaagagaataagaagcctggcacagtggctcatgcctgtaatcccagcactttgggaggtcacagcagaaatactgcttgagctcaggagtttgagaccagcttggacaatatagtaagaccctgtctctacaaaaaaatttttttaaaaaattagtcaggtgtggtggcacatccctgtagtcccaggtacttggaaagttgagatgggaggatcacttgagccgggagttggagacacagtgagctatgatcatgccactacactcctccctgagtgacagagtgagaccacatctctaaaaagaaaaagaaaatgaacaacccgaatttaaaaatgggcaaaggactgtaacagacgtttcacttaaaaaatatatatagatggcaagtaggcacatgaaacgaagtttaacatgtcattaggaaattgaaagttgaaacaacaattgaggtgctactacacacccattagaatggctcacatcccgaaactgacaacaccagatgctgactgaggaggatgtagatcaataggaatttatttattgtcggtaggaatgcaaaatgatacagtcactttacatgatggtttgaaagttttttacaaaactaaataaactcttaccatgtgatccagcaatcacactccttggtatttactcgaatgagttgaaaacttattttcatacaaaagcctgcacgtggatgtttatagcagctttattcataattgccaaaacttggaagcaaccaagatgtccttcagtagatggatacataaataaactgtggcacattcagacaatggaatattattattattattatttgagacagggtcttattctgtcgcccaggatggagtgcagtggcccaatcacagctcactgcagcctcgacctcccggcctcaggtgatcctctcacctcagcctctcgagtagctgggactacagttacatgccacaatgcccagctaattttttaaattttttgtagagatgagttttcactatgttgcccaagctgatctcaaactcctgggctcaagcaatctgcccaccttggcctcccaaagtgctgggattacaggcctgagccaccatgcctgaccaccagtggaatattatttagcaacaaaaagaaataaactattaaggtatgaaaacacatagaggaaagttaaatgcatattactaagtaaaagaagcccatctgagaagtacacatactatatgatttcaactgtgtgtcattctggaaaaggcaaaattatgaacacgataaaaagatcagtggttgccagttggagaagagagggagggagggacgaataggcagagcacagaggatttttagggcagtgaaactattctatatgatacaggttgagcatcccaagtccaaaaatatgaagtctgaaatgctccaaaatccaaaacttttaaacaccatgttgggatgcttaactggtaagtctataatgcaaatgttccaaaatcgagaaaaatgtgaaatccaaaacacttctgttcccaagcattttgaataaggaatacttaacctgtactacaatggtagatgcatgtcatcatacatttgtcaaaacccatagaatgtacaatgctaagagtaaaccttaatgtaatctatggactttgggtgataatgatgtgtcaatataggtttattgacataagtacaaatgcacctctgtgatatgggatgctgatagtggggggagggggttgttcatgtgtgaagacaggagaacatgggaattctctgtactatcccctcagttttgatgtgatcctttaggtttgtgaacttttctacaaaataaagtttattaatttaaaaatatattgaatggaatttgtagcaggttagacactgcagaagaaaagttctgtaaacttgaaaacacagcaatggaaagtattccaaatgaaacatgcagagaaaaatatggaaaaatttaaacaattatcagagacctatggaactatatcaagaagtctaatgtgcatgcaattggagttcctgaaggagaagacagatgggaaaaaatatctgaataaatgattaatgaatttctttcctaatttgaagaaaactataaatctatggatctaataagctcaacaaactccaaacagaataaacaaccaaattatggcataccataccacagctttccatactgtggaaaacagtgataaagagaaaaatcttaaaagcagctggtagagtgagagaagacgctttatgtgcagaggaacaaagataagaatgacaggagacttctcttctagaagtatgcgtgccaaaagtacatggagcaacatctttgaattactgatagaaacaaaacaaaacaaaacaaaacaaaacaaaactgttaaccctaaattctatagccagcaaaaatgtatttcaaaaatagagaacaaataaagactttctctggagataacaaagccagcagaattcatcacaagcaaatctgtactacaagaaatattaaaagaggttcttcaggcagaagaaaatgacactagatgaaaattagtatcagccaggtggagtggttcatacctgtaatcccagcactttggaaggccaaggcaggaggattacttgagcccaggagttcaagaccagcctgggcaacatagtgagaccgtatctttattttaaaaataaataaataaataaataaataaataaataaataaataaataaataaataagaaaattagaatctatacaaaggaatacaaagtgccacaagtggtaaaggtataggaaaatgtaacagattttttcctcacttttaaatctcttgaacagataattaatagcttaaagcaaaaaaaaaaaaagtattgtgggatttatagcacatgtacaggtctgacaaaaatagcacagatgggaaaagagatatgaaagtatactgttgtaaggttcatatgctaaatgtgaagtaaagacagactatattacattaaagatgtatagtgagaacttcagagcaacctctaaaagtaaacacacaaataggtctgggtaagacaatagtggggattaaaatggaatcataaaaaatgctcaagcggccgggcgcggtggctcacgcctgtaatcccagcactttgggaggccgaggcaggtggatcatgaggtcaggagatcgagaccatcctggctaacaaaggtgaaaccccgtctctactaaaaatacaaaaaaattagccgggcgcgggggcgggcgcctgtagtcccagctacttgggagcctgaggcaggagaatggcgtgaacccgggaagcggagcttgcagtgagccgagattgcgccactgcagtccgcagtccggcctgggcgacagagcgagactccgtctcaaaaaaaaaaaatgctcaagcattgcaaaaagaagacaggaaaagaggatcaaaagaacaaaaaagaaatggaacaaatagaagacaaatagtaagataagcacaatataattctatatgtttaattttctttaatatttattgataatgttttaccatttctatgtagaacccttgcacatctagtgaagatttgttcctagaattgttatgttttctgatgctattgtaagagatattttaaaatttttatttcaacatgcttacagccagattataaaatttaattggttttggtcatatttatattgtatctagaaactttgtacattgacttattaattctaatagtgtgtgcatattcctttggattttctatgtatcaactgtgttgtctgcaaatattggtagttttttcctttataacttttatatcatttgtttctttttcttacctcattgcattggttgggacctctagtatagtgctttttgcagataacctttatcatataaaggaagtgtccttctattcaaagctttcttttcttaaaccaagaacgaatgttgagttttatcaaatgcttttctgcatttgtagataataatcatatgatttttctcctttattatgtgaaagtggaaatttctcattgattttaaatgttcaactaatcttgctttctcatgatgtacaatagtccccacttatctgtgaagaatatgttccaagaccccaccccaatggatacctgaaactgcagatagtaccaaaccctatgtatactatgtattttcctgactacatacccatgataaagtttaatttataaatcaggcatggtgagagattaacaataactaacaaaatagaaaaattgtaacaatatactataataaaagttatgtaaatgtggtctctctctctcaaaatatcttattgtattgtactcacccttcttttattaagtgagatgagacgatgcctacatgatgagatgaagtgacggagtaggatggtgcaggatttcatcacgctattcagaacaacatgcacattaaaatatgaattgttggctgggcatagtggctcatgcctgtaatcccagcactttgggaggctgaggcgggaggactacctgaggtcaggagttagagaccagcctggccaacatggtgaaaccttgtctctactaaaaatacaaaaattaaccaggcatggtggcacatgcctgtaatcccagctactcgggaggctgaggcaggagaatcacttaaaccttggaggcagaggttgcagtgagccgagatcacgccattgcaccccagcctaagagacagagcgagactccgtctcaaaacaaacaaacaaacaaaaaacatgaattgtttattgctggaaataaacacatagtttatttccatttcatatttttggaccacagtttactgcaggaaggtcactaaaaccatggaaagtgaaaccacagataagggaggaatactacaggataccttatctttttcatacattgctgaataagattgccaatattttgtttatggtttttgaatccatgttcttgggtgaggtttacctgaaatttttctttttttttttttttttttgagacagggtctcactttgttgcccaggctggagtgcagtggtgcgatcttggctcactgcaacctccgcctcttgggctcaagtgatccttctgcttcagcctcccaagtagctgaggctataggcatgcaccaccacgcctggctaatttttgtatttatttatagagctgggatttcaccctgttgcccaagctggtctcaaactcctgggctcaagcaatctacccaccttgaccttccaaactgcctgtagcatcagccaccgtgcctggccgaaatttttcttttttgtactgtcaggtttggcagcaagttaatgctaagttaataaaatgagttgagggaatgaggcctctttttacatgctttgaaatagcttgcatacaattagaattatttattctttgagtgtctggaacttgctggtgatgccagcagggcttggagtttaatatgtgggaaggttttaatttacacattcaatttctttcatgattataggattgtttggggtttctcttttagtcagttagattttcctgagagtgggtctgtttcttagaagatttcaaatttagtgacataaaaatgttcaacaatgtcctcttattattttgtttcaatctgtgaagcctttatatttatatcagtatttcattcttgatattgtttatttatgctttctctctttatttcttggtcagtcttaccagaggtttgtcatttttatcagtcttttcagaggaacgtttggctttgctaatcttctctgttgtgtttattttccatttcattaatttctatgcttctctttatttcttttcctacctttcttgagtttattttgctgatgtgtttctaacttcataaaatggatgtttagttcattagtatttagtttttttcttttctttttttttttttttttgagacagagttttgctcttgttgcccaggctggagtgcagtggtaggatctcggctcactgcaaccgccatgtcccaggttcaagtgattctcctgcctcagcctcccgagtagctgggattacaggcgcatgccaccacacccagctagtttcgcatttttagtagaggtagggtttctccatgttggtcagactggtcttgaactcctgacctcaggtgacccacccacttggcctcccaaagtgctgggattacaggcatggccacctcatccagccttcttttcttttttttttaaacatagccttttgggccataaattttcctcagaattgtttcatctatcccaaaagttttgctgtgtattttcattacagttccatactcaatattttctaatttctgctgttttcttctttgagcccctggttatttaaacacgggtttcttaatttataagtatatgtggattttctattaactatctgttactgatttctaccttaacttcattgttgtcagagaatgtattctatatgatttcaatacttaaaaaatatgagatttgccttatgacctggtatatcagcaacttttgtaaatattccatgtgtgcttgaaaagcatgagtttctgcagttgttgggtatggtgttctaaatatgtctgtgatggcaatgaaaacgcgccactcagctcttctgctaaatatgcgtagagtggtcatgaacgtgtgcaactcagctctcctgctatggggtgcacagttgactggcagccctaaccactattcctttggatcccacaatgcatttgtgctgagaccactcttcctctgagctgcttccagctggtggagctgagcttgtcgtggttactagtgcaggcccattcctgtgggatttgagactttttaaatgggcaactttggttcaaaggcaccccatcagcctggccatgccctttatagaattgcactgtagtctgagactctacctactcaagtgttcttccttttcccactcctttcagattggtattgtgggcagaaggctctctctgcctgctactgcttcctttcctttatccttcgtgggcagtttccccaagacacctctggcatgtctaatcttatcttggcatctgtttcctgaattgatataatgtccctttggtcagttgtactgcatgtgttgttcaaatcttctgtatccttactgatgttttttcctgtttgttctgtttgttctaccagttactggaagaggtgtgttaagtgccccaccatggttcctgatttgtttatttcttttggtaattaccaattttggggagatatatatacatatgatttcagaccttatcctccatgcagaatttgtgcttaatatatttcaaaagttattgagtatgtaaatttaaaatagtctgcgttgaactgacttgtttaacgtcttgaagtggcatctgtctctagcaatgctttttgctttaagtctactttgctcattaacatagctaaacccagtacacattttcttagtacaccttttccccccttttgcttttagactctctgtatactcttgagatatgtttcttatgaacagcatatagtttgatttttaaaaaattcattctgacaagctttgtattttagatgaaacatctaattcatttatatttgtcattatttttcatatttctggttctatagctattataccttttcttttactactattttcccacaagttccattctttctctactttcttgccctcttttggattgatttgttcttttttccatttccactttttccctccaccgatttgagaactgtttctattctgtaaatggaatctctagaaatagcagcaaataacttagcaaaatcaaagttacttagcaattctactctttttcggaaaaatatgaaatcttacaacttccacttatgccttcctgacacatatgctgttattgttgtgcatttagttctatcaacttttctttcaaaagcccacaagtctattactattgctttaaatgttcaatgtttcacctattttctcacttttttgtgttttatttcctcttgttctctacaccttccatctgaactagcttttcttctgccagaactgaaggtttgttagtagcaagttgtctcagtttttgtttgcctgaaaatgacttttcctccttaattatgaatatagagttgaaaatgaacaatcatcttctctcagcacattgaagatatcatacattgtcttttgatttcagttgctgctaatgagtagtaaattgtctgaaactctttttttttttttttttttttgagacagagtctcgctgtcgcccaggctggagtgcagtgatacgatctcggctcactgcaagctctgcctcccgggttcacgccattctcctgcctcagcctcccaagtagctgggactacaggcgcccgccaccacgcctggctaattttttgtatttttagtagagatggggtttcaccgtgttagccaggatggtctcgatctcctgacctcgtgactcgcgcgcctcagcctcccaaagtgctgggattacaggcgtgagccaccgcgcccagccagttgtctgaaactcttttaaaaataatctgtcttttctctttcactgttattaagatattctttttgtctttggtgctctgcaacttcattatgatagagataaatgctagctagctaaatagttagctatttatatatttcccatgttattattccagtaaatctgtcccctgagttctttttttctagaagttctttagattctttttcaaaatcacttgttttcttgttttctttttcttgcatacattttcatgcatgatttttatttttattaaatgtatgaaacgtggttgtttaaaagtctttgtcttatttcaagatctgaagtttttgcaggattgttctagctatctgctgcttcttgcacttagttcttaagtgccctattttattgtgtagttagtttctttctctctctctctctgtcatttaactttaaactgatcgttttccttgacattttatgtgtgggaatactttgaagtctgggataaatttggcttcctctataaaggattcacttttgcttctgccaggttctggaggcattactatttctgggatcactccagttacattctccacttggtctatccagaccacccagagtgtggattttttgctataaactgtgtcatggacagcttgtggtttgaatgtttagtgatgattcttggcacgtgtgtctacacacgcacacaaacacacacaaagacacacacataaacatacgcacctgtcttaccctcttcagtgcaagtgtgaggcagatttcccctgcagtcttcaagagaatgtgggaaatattcctttttttttttttttttttttttgagacagagttttgctcttgttgcccaggctggagtgcaatggcgcgatcttggctcactgcaacctccacctcccgggtacaagtgattctcctgcctcagccttcccaagtagctgggattacaggcacctgccatcacatccagctaatttttgtagttttagtagagatggggtttcaccatgttgaccaggctggtctcaaactcctgacctcagctgatccacccaccttggcctcccaaagtgctgggattacaggcgtgagccaccgcgcctggcccgaatgtgggaaatgtttctgaatttccccttacacaaaggggatagcctttggaagcatcccagctttatggtggaagactacttattaaactcctcatcttggtcagacggtgggctttgtctcctttttcacagtcttgtgaggccatgaataccaaagctcaaattcagcaggtttagcaaatgcctttggaacacattgctctacccacatctctcaactactccgctaaatccctggactaagaattgttaatttttctgcttattcactgatgctcttaaattatttttaatccagaatttttagttattttcaataagtatattgattcacttgccatgtttccagaaatggaaatcaattttattaaaaaaagactcatgttttataattcaacagtcttcatttaaatagtaccaatgtacagtgtccactgaaaatccactgtaacgttaatggattaatcatagtgcgtatttgcaaagctcttttaacttttcaaatggttttcacatgtatctgtggttctcaaggggggggtggcactgcccttctggggagttttgaaaatctgaaggagttgtttagattgtcattatggatgggagccattatcagcatttagtggggagccaaagatgctagactcctacagtgcctagggcagtcctgcccaaagaataattgcactgtgtctcatatgacttttcagtatcccctggtcgttcagaaactgaaaatcataccttgtcctgtgtcatagcataggggcttattttaattcttctttttaaattttattttatatttatttatttatttattttgagatggagtttcgctcttgttgccgaggctggagtgcaatggcaagatctcgactcactgcaacctccgcctcctgggttcaagcgattctcctacctcagcctcccgagtagctaggattaccggcatgtgccaccacacctggctaattttttatatttttagttgagacagggtttctccatgttggtcaggctggtcttgaactcctaacctcaggtgatctgcctgcctcggcctcccaaagtgctgggattacaggcatgagacactacgcccggcctattttgttttgtttttgtggagacagggtgtctctgtgtcaccaagccagagtgcagtggcgtgatcagagctcactgcagcctcaaactcctggactcatgcaatcctcccacctcagcctccaagtagctaggactataggcatgtgccgtcatgaccagctaattaaaaaatatatatatatagtagagatgggggtctcactatgttgcctagactggtcttgaactcctgggctccagtgattctcctacctcggctccccaaagtgctgggattacaagcgtgagccactgtgcctggccatgcttctcttcttaataaggaccagtttatttgtgagatcttcttcttcctcaatttttccactttgataatttttaatttgtcttggcatgttattcttacttcaattaagattatatctctcttgtttcttatcatatgcaaacaagcctggtttgttttcatttcttctaacagggtcattgtggtgaacacctgtacctctgctccttgatttccttaagctctaaatccaagctaatatgttcattataactagttgctatcatttcactccttcaatgtgtcttctaatggaatcatgccaaggcagtcacaggttgaaacacaaatttgtgtgtatctatctaccctttatactataccttggacatcatttttggaggaattatgtttgtaggtatattgtctctgaatttaatttcaggatagtgaaagaggcctttacagaatatatgtttagaaattaggtctggctgggcgccgtggctcatgcctgtaatcccaccactttgggaggccaaggtgggtggatcacttgaagtctggagtttgagaccagcctggccaacatggtgaaacttcaactctactaaaaatacaaaaattagccaggtatcgtggcaggcacctgtaatcccatctacttgggaggctgaggtgggaggctcacttgagcctgggaggtggatgttgcagtgagttgagatgataccactgcaatccagcctgggcaacagagcaagactccatctcaaaaaaaaaaaaattaggtctgatagggtctaatagggttaagaacacagacatatttgtttcctttcattcttctaaaaactctattaggtagatacttttatttatttttttgataggggaggagacttaggcttagaaaggcaaaataacttgtccaaggtctctgagatctttaattaggcttgattacaaggtggctgacaccctgcatcccactactgatgtcttgcaaactgtccatttattctgtcaatgagtatgcatggtgcagctgtgagaaggggacggtgctggatgctgtgtagaaggcaggaatacataaatcacagtccccactctccaggagaggagagaagatttgctagaagcccagaggccaagtacaacccagcagcatcattgtcaccagagtagcacaaaagcaggaggccactctgctgaagagacataggaaggaggagtacatggaagaagtacactggctggaggctttgggatgggtggaaattggacagggtgaggagaggcaggatgggctgaggaggagggcattgggcataactcattttgcttaagcaaaggcagaccagttttcctggagcacccaggttagactgtgacataatcaaattcctgagaacagaatgactgtaagacaagcatccaagttgatatcacaggtcaccagatatacatcaaagagaggatgaggaagcagacagggtagtacaataacacactagatggcaaataattttgtacttttatgacaaactaagatttaaggatgttctttgccacattgtttatgctagggaagcattagaatccacagaaatgtccagaaataagaaaatgagtgcacagttatgctacattcagctatttagcatactatgtatttagcctggtttcattaacaagtcaaagttatacacaaagaaagtggggagtgggagaggttggttaggggctggaacaagatactgttgcaacctcaaagggacatcaaagacacagtccattgaaatgcatggttcttgattggatcttggtttgaataaaccatctataaaagaaattgtggaaaacaagtgaaaatttctatatggagcaagtattagatgatattaagaaattattgtgggctaggtgtggtggcttatgcctgtaatcccagcaccttgggaagctgaggcgggcagatcacttgaggtcagttcaagaccagcctggacaacatggcaaaaccccgtctctataaaaatacaaaaattagccatgcgtggtggcacatgcctgtagtcccagctactcaggaggctgagacataagaatcgcttgaacttgggagatggaggttgcagtgagccaaggttgagcaactgcattccagcctgggtgacagagcaagactccgtctcaaaaaaataaattaataaataaaataaaaaagaagaagaagaagaaattattgtgaattttgaagttatgtaggaaaatatcccttttgggatgtatatggatgtgtttagaactaaaatgtcatgatgtctgcaatttacttaaaaatactttagcaacgaagtagatgaagtcaatacatcaaatgttaacagttgttatctaggagatgggtatggaggtgttcattatcctactttttctacttttctatctatggttaaaaatttccataataaaaagtacaaagaaaaaaaagagagaaaaagaagaaaataacgtttataaataattttaatgatgtagaaaaatactatgatataatgttagataaaagaaaagtaagaatgaaaatttttgtatataaaattttgattcttatataaaacttatatataaaattttgtatatacagcatatatattttttgtacattcagtagtatacaatatggtcttaacattgctttaaaaatgaatacatgcaagttatgaaacactcaccaagggccaggtcctggggatgatgttggtattagactgttctcgcactgctataaaaaactacttgagactgggtaacttataaagaaaagaggtgtaattggctcacagttccacaggctgcacaggaagcatggctggggaggcctcaggaaacttacaatcatggcggaaggtgaagaggaaggaggcacatcttacatggccggagcagaagggagagcgaagggggacattctacacactttcaaacaatcagatttcgtgaggactcactcactataatgcaaacagcaagagggagatccggtccccatgatccaatcacttcccactaggtccctcctccaacattggggattacaattcaacatgacgtttgggtagggacacagagccaaaccatatcaatgtttaatacacattgtaaataatttcccctgaccccatcagctggtcaacaatggagccaagacttgaacccagactcagcccattccaaaacccatgctttttccctacaccaggagttggcaggctctcttggtaaggggccagatagtaaatattttttggttttgaggaccatatggtctctgttacaactactcaatgatcctattatagcaggagaacaaccatagataatgcacagctgaatgtgtgtggctggcttccaataaaactttatttacaaaaacaggtgatgggccagatttagcctggggctacagtttgcccactcctgccctatgaacatgatgctgcctttcaaagcattcaacacacccatacatacagacacaaccagagaccaggaaaaaaaatcatgcttaatcatcattctttccgtcatacttttctgtatatcccaaattttctaacatgttctgttacttgtatgtattactcctatatatatctatttatttttacaacttctttgatttattttctgggaggagaaattttctataatgcatttacatagtcccacattgaaaggacacaaaggctgaattgtgaaaagtctccttcccacctatgtaccaagccacctctgtcccttccccacaggaaaccaatgttattccacctttgtattcttccagaggttatgttacccacatgcagccaagttagcagggccaccactgtgttgcacgactccaagagacatcatttatattgagctcctgggatgccattgacatggaatacaatggaattgtgccccctggagttgtgtaatgcagcagcctcaccaaagatgtgtgtgtgtgtgtgagtgtgtatctatacacttataaatatatgtagagatatatatgtgcattttttctactgtccttttttttcaaccaaaattagcatattatatacaatgctctgcatctgactttttttcacttagtaatatattttcatactcatttgatgtcagtttataaaatgtcctcattctttttgatgatgatgatgataacggtcttggtgtggcatcacaaaggaatagtaagtgaccattgtcatttgcgttccagggattgttctaagcatttgcatgtatgtcattcattcctgagcgctcacagcgaccccatgagataggcacagagagatgaatgtactgacccacagtcacagctgagattaaaaaagaactcttccctggttccttctagtacttggatgggttgtgctgtacattcagatcttttctccgtttggaattcttccggcagtaactatgagatgaggatccaaccttgtttttccttgacggctcctgttattcccaccactgtctccagatgccacctttcccacacatgaaagtcttgaaggatttgggcctattgctagactttctttctgtttcattgttctgtccctgtcatcaagcaccagtgccatactcttaattcctgaggttttagaatctgtgctaatatctggtagagttttgtctcttcattacttccttttttcagaaatatcctggatagtcttggcttgtttatttttccacatttttttattgtggcaaaatatacattgcataaaatttaccattttaaccatgttaaattgtgcaattcagtgatattaactacattcacactgttgcattaccaccaccactatgcatttccagggcatttaaatctatttccaggctgggcatggtggttcatgcctgtaatcccagcactttggaggccaaggcagacggatcacttgaggtcaggagttcgagactagcctgatcaacttggtgaaacccccatctctactaaaaatacaaaaattagccgagtgtggtggtgggtgcctgtaatcccaggtacttgggaggctgaagcaggagcatcgattgaacctgggaggcagaggttgcagtgagccgagatcgcgccactgcactccagcctgggtgacagagagagactccatctcaaaaagtaaaataaaataaatctatttccagaactttaaaaaatgatcacttctcagccttttggctaagatctagtgcagaacttttttttatcattccaaactgaaattctatacccattaaacactaactcccattctcctcttccccaagtccctggcagacaccattctgtctgtaggaatttgactactctgggtagctcatataagtggaattgtataatatgtatcttctggtatctggcctatttcacttagcatagtgtcttcaaggctcatccacatccacatcatagcatgcatgtatcgctcctttattcctttttatggctcaataatatgacattgtatatatgtaccacctacatatatttgtttatcagttcatctgttgatgaacacttggatcttgggttgtttccaccatttggctgttgtcaataatgctgctatgaacactggtgtactccagattaatttcagagtcagtttgtccaggaccaaacaaaacattcttctactacttttataattaccctctctcttccccagtttcccctcatgcctcccagtggtcattcattatcttgttcaatcccaacatgccccagatacctttctggatgtatcgtccatcactgcagtgccgcctgtggttctgcctgcccttgcctgccttccccttcctggcaaagctgtgcagctgctctccaggcatttacttggaaaaccactttcctttgcttggtggcttcattggtcctgagggactttactggaacttctggtaataaattgctctccttgcacctacctgcagaccctacctgcacaccgtacctgcctccagcctaatagggctctcaggctcctcaaacaagccctagcttgcctgccccggaaggccgtccttgccagccacctccagcactggtccctctggggaatctttctgcctctcttgtcataacttcaggctgctggccccctttcccctgccactttgcccatccatcctgtttgagagacacctttgctctttcctgatctgtctgtggctatcctcagcctgggcacaggtggcacacctctcacttctccaccaccctctgcacgtagcacactgttttccatataatgggtgctggtttgaattgggttaaatcaagatcatctccctctgcaggcttaggagcaagtaaagcaaccaaagccctcctaggcacaggacaatcttgccgccactcccaccctcctggcagctcatggtagacctcagggaagtgtaaataacaccatcctgttggagacctgagacatccaggcacagcctgcttccctgaaggtccagcttgtattctgatcctggctacctgcaaggtcccctatgtgtgctgggtccctgtgcctgacccaccacttcccagtccaactctgtgatgagttctgacagcacgtggggagtgggttacaaacggaatctaattcatgcctggctcactgtgtggtctgctcttcacccttcagttgcagctcttgccaaaaaggtctctgtggcctgattttttgtgaacatgtgcatatttgtgtgtttcattgcatttcatgttcatcttaattgtttctttctctttatttctaagcatttaaaattcacttattcaacaaatgttttctgggcacttactttgtgctaggcttgtgccgcaaataagacaggcaggctgggtgcggtggctcgcgcctgtaatcccagcactttgggaggccgaggcgggtggatcacgaggtcaggagatcaagaccatcctggctaacacggtgaaaccccgtctctactaaaatacaaaaaaaaattagccgggcgtggtggtagtcgcctgtagtcccagctactcgggaggctgaggcaggagaatggcatgaacctgggaggtggagcttgcagtgagccgagatcatgccactgcactccagcctgggcgacagggcgagactccatctcaaaaaaaaaaaaaaaaataagacaggcaaagtctcttctctcttggatagggggtgagaagcaggcaattaacaaggaaacagaaattagcacaataatttcagaatgaaaagtgctaggaagaagaaaaaatagaataacgtgacagaaaatgatttgggaataggtggaaaatattttagattttggtattaaatttctcttctccctagacttcacagacagttgttaaagacagagggaaactttcctacatcaatgagtccaccttgtaatttaaataattgtctttttaataggtctctttacttagttgatatttgaatgttgagctttttaaaaataagctgttttttgaaagagaattatagaaatttaaagtttattcattcaacaaatacttgttgctctcctaccacatgttggcattgttctaggtgctggaggtatggtaaagggtgaaacagatgaggccttgttccatagagtttccagacaattctctagaaagaagtaaacaaaataacttcacatggtgttgggtcctatgcaggaaataaataaagcaaagggtagggaggaaactttagagagattggtcagagaaagcctttgtgaggaggtggagttgaaagaggatgaagatacagagaaaagggaacgtcatacgttgttggtgggaatgtaaattagtacagcctctatagaaaacagtatggagatttctcaaagaactaaaaatagaactgccatttgatccagcaatcccactactggtaacctttaacagtatatacccaaaggaaaagaaatcagtatatcaaaaagatacccatactcgtatgtttatcgtagcactattcacaatagcaaagatatggaatcaacctaagtgtccatcaacagaggattggataaagaaaatgtgatacatgtacacaataaagtactactcagtcattaaaaaaatcaaacagcagcaatatggatggaattgctggaagacattatccccaggtgaaacaagccggagacagaaagacaaacactgcgtgttttcacttataagtgggagctaaatcatgtgtacacatggatgtagggtgtggaataacagataatggagacttgaaagagtgagggggccaggcatggtggctcatgcctgtaatcccagcactttgggaggccgaggtgggtggatcatctgaggtcaggagtttgagaccagcctggccaacatggtgaaaccttgtctctactaaaaatacaaaaagtagccgggcatggtggtgtgtgcctgtaatcctagctactcaggaggctgaagcaggagaatagcttgaacccgggagggtgggaggttgcagtgagccgagatcacgccactgcactccagcctgggcaacaagagcgaaactcggtctcgaaaaaagaaaaaaaaaaaaaaaagaaagggtgaggggatgggggaagtgaatgatgagagactacttaatgggtacaatgtatttgagtgatgaataccctaaaaaccctgattttaccactatgtgatctatgcatgtaacaaaattatacacgtaactcataaatttacataaataaactaaaaaataatttttaagttagcaaacaacttttttaaaagaagaataagcagataccccacatagtgagtagacaaagaacatcccaggcaaaaggaacaaacagcatctgcaaagggcttgaagaaggaaacagcttgttttgtttaagaaatgatagaaggctgggcgtggtggctcacgcctgtaatcctagcactttgagaggccaaggaaggtagattgcttgagcctaagagtttgggaccagcctgggcaacgtggcaaaaccgccaaaattaaccgggcttggtggcatgcagctgtagtcccagctactcaggaggctgaggtgggaggatcacctgagcccaggtggtcaaggctgtggtgtgctgtgatcatgctactgcactccagcctggatgacagagtgagaacctgtctaaaaaattaattaattaattaaaaaaaatgaaagagatgatagaagatggtggtgtaatgtgaggttggaaaagcagacctagaacataccacggaaggtcttttaggtgacagcaagggggttcgatgcagtgggaaaccgctggagggatccgacctgcatcccataaagacctctttggctactgtgagggaaacagacattttgggaaggttccagaagtcaaggtagaggaagactagtctataaagcggaccgcctttgtgaaaaatcaacctatgaaagaagccaacatacaaaagatacactggaagtgatcaaagacttccaagagcagccgggaggtggaatctcaagtccagatgttgaatgagttgggtgattgtatgggacagaaccagaagctgatgaggggcccaggatgcagatcaaagagatgggatgagcaggcaaatgccatttcttttcattccgcctattttgcttgagtcaccagtttggtaaggggagagtttcaaccatctgcaagtaatccaaatgcttttactaacctgcctacccatccacacccccaccaaaaaaaaaaaaaaagaaagaaagaaagaaaaataagaagccaaccccagagcttgtacgcctgcattctccacaatcatttctctgtgttacagctcttgtcatcttacattatacatgaataactaatcaaccaaacacaaacccactgatgaaaaaaaacgcatgttggatctagaatgtgagcagggtaaagagtaatattaatttcactggcaaataacaaaatgggagcaaacatgagggatgttaagacaagacttgtgtttttgaatgcttctgggaatggaaactctccaagaatcaagggaaaggggaagaaggttggacatatttggagtgcactaataccaattcttttttcttctggtatgcatatgtgactatatgcaacatcatcctgggtcaggccaactggtcatttaaaccaccatgctgtctgcctcacctagtcgaacagttcatataatgatcttccactattccttaatggacatacaggtgttagtcttaatgcaccaaccaatattgcgataggctggaacaaaaccttttgctctttgaatgtccacagtgagtaacactatgctaggtatgtagtaggtgctcaataaatgtatctttcacacacttcctaaatgaagtctatttcttccttcatcgttttcctgaaagatctttcttgaccactaaggatgaactcctcatctccatgtccagtgagtggtttagaaatgttttagtcttcctcctccttgacttcataatggcatctgacactgctgtgacacttcagttgtcttctgtgactctgaacttttctggttctaatcttttctccctgatggcctctctaccctgacctccaatgatttcttttcctgtttctgcactcgaaagtccatattccacaaggactctgcttttctgtcttgtcactctttatgagaaattaattgtatctcatttcaaatcaatgcatgtatctatcatcctctgtcacattacatgcaaagtatctgcttatggatctgtctgtccaactagacctcaagctcctcaaaaacagatccctcactgtgttcgtctctgtgcctccagtacctggcacagagctggacactcagtgaatgctccatacacacgggcccaactgatccattctcaaattatgctcggagttggtagattgggcagaaattattacccccattatatagagaggggaccccaaagctcaaggaggtaaagcaaacattagaaacatgattcctgtgactggctgtggagactccgtgtaataatcattctggtattgccaattgcaaaaggactgtaaaactaatagagatgctgtctaaataccgacatccaatcctttcatgctcttctgagcaggcttgaattttccagtgcctctcttaaaatacagcccgcaggactgagcataaaactgcatgtggcctgacctgccagcacgcgctgggagtattgcttccctccttccacactctgctgtgctattaatagagcctcagattgcactagggttctcaacagcctcctcgcgctgtaggttcacatcaagctggtgatcagctaaccccccgggtctttctcatgcaatgccttctgtcaggccaggcctccccagcagccacttgggcaatgaatgtttttgaatgctcatgattatttgtgacttagactagaaggtacaacaccagatcatgcccttctttctcatgtggcattttgctgagtgggtgatggggtcttaggggtcctgttcaggacccagagctgtggccagccactgggggccaccagcatcatcggccccacaaaagtaagaggatgatggcgaaattaattttctggctcacttcaaattattcttatgttcatccctactcctcttggattaggtcctttcttggtcttgttctaatgctgggtgtttgtatgcacagcctcttttccctcccacccatggacacagccacattttgatttctcatgccctttccaaatagtagtagtatttttagcatgaatatcttgctcagaaattggctgtacagtctatcccctattgtcttcacatctaatacttttcttttttccctctgcctctcctatgcatcaataccacgtttggctaaagagatttgattttgacctatttgaattctcccttcacagatgacagccctttctccctctccttccttcccttcaattagttttttcagccacttggaattagctgatgggtgattgtagaaattgcaacgtgggctactgtggtgggtctcaatgtcaactccaggaaacctctgaatctggggggctctggtttcagaatctgatagccaggccctgaactctggaatgtggggctgtgacatgagatacagcttctctttgctcggccactagagggaactgaaatgtggggcgcaagaaggcgtttcctctgttcgccagacgagggcgctcatacccatggtcctccaaagttggaatttctcgccccaaaacagatattgtcgggttggcctccttgtaacccaaacatacgatgggatgacattacagctgtgctactgattgctgctttgaccgcctcctatgctgtgtaaatggccaaaagcaaagaattattaaaaagcaggcccaatgttgtccaagctcacgtgtggtttgtgggtctatgtgtttgctgctggcaaatttgcaagcagatgggactccaaggcaaggcgtggaagtgatgatgggaacgttggaagttcacagacataacttgtagagtgtgtgaggccgggtgcgcggaccctgtgtatctgcagctgcgatacttagatttcagtttggcaaggcaggtcacggtggagatggggcaagctgcaagggtggtggagaggaggaagggaaggtgacagtggccctctgtcaactgtttccaggtggagttgaaaggtgtaatcattttcttctgggggccttggcacctttcatcaagacgaagttggtgactggtttaaaaagatttaaaaaattaagctcgagaggccaaaggagaaaatggtttccaggtggaaagggcttgacagaatggtgctcttgtgccgtgactccgaactccgtggagcattccagtggcccactgtactcccacccctccaggcagcactgggaggcagccaagtctaggaggcaaagggctccctaactgccaagcagtgaagatgttgaataaaatatttacttacacgtttaagaataatgatgacagcatgacaaacagtggtgaaacagctttaggggacatggaagggcagccctgggatatttttaatgagaacagtgacttcctgtttaattcccgaggcttgtctcttttgcctaccatacccacactggtatcacaagataccgcccatgattggggagggggttcaccagactggcctagggagtcccctgcaggaagctgccacatggagaggctacagccagcctcactcccaaccctaagctattgcccaccttttgcaactcctgaagattacagctttctgatcccttccccccccctacaccagaagggtcctctgttgtggtcattcaataaatgatatttcttaattaggaatctagctctttcttattcagctggactaataagcaccctatgccctgcttgggtgtgataattttgagttggagacaaggaaaaaggagtgaatgaaagggagtaaaagtcttcacccacagcactagatttcagctatgcccaacgtgaaaatggaaagggaaaatggaaaaaaaaaaaattggccaaacacgctttaggtttgtttttccctccttttgggagctttttgcattttcctccccaatttggaaaaaaaatgaaagaaaacaaatttctctatcatttaaataaaacagacctttatgtctctaaatataatacatcaaacaatgttaggagtaactaaattatacataaagatacttgtttgttagattgttaaaggctgtttgaaaaatagaatttcgctggtgaggtgcctcacacctgtaactccagcactttgggaggctgaggcaggtgggtcacctgaggtcaggagtttgagaccagcctgaccaatatggtgaaaccccatctttactaaaaatacaaacattaggtgggctgtgatggcacatgcctataatctcagctactcaggaggctgagacaggagaattgcttgaaccggggatgtggaggttgcagtgagctgagattgagccactgcactgcagcctgggcgacagagggagaccctgtctcaaaaacaacaacaaaaaataagaatataatttcactttttgtcagcctcacatcctccatggttttgtgtgtttatttttccagatattttatacctccagttatgactctgtagaaagataccatctgggggccaggcatgatggctcacccctgtagtctcagcactttgggaggctgaggcaggtggattgcctgaggtcagcagttcaaaaccagcctggccaacatggcgaaaccctgtgtctactaaaaatacaaaaattaactgggcatggtggcaggcgcctgtaatctcagtcactcgagaggctgaggcaggaaaattgcttgaacccaggaggcagaggttacagtgagccgagatcgcgccattgcactccagctgggagacagagtgagactctgtctcaaaaaaataaataaagataccatcttggctttcccatattatacagatccagaagaaagaccaacttaggatctctatgcacatgattatttcatattttttggaagaaaataaactagtgttgaatttaagaacatgctcagaagtcatgatttttgaggaaggaggctatttatttaaatcgatataaaggaccattagttttagacctgtaatttatacttggtgaaattttcatggaaaaaaaacaacaacaaaaaaactcatttccctaaatattttctagtaaaaacatggcttgcttttttggtgcaaagtctgccacgctgtttttaaaagcgaggcttacgagaccgtgggagagagataagtgaacagcctctttaataagagaggcgtccagcgtggcggcggaatgcaataccaaaaagtaaacaaagagcatcgtgtgaaaaagagcaagttgaaatgaatcttgcttttcctatttgaaaaacacgctcatggttgttagcaactgagtcaagacatttaaatcatatatatacttttagatcttgacagtgaccttttataagtgtacagtggggataagaagatgagcaaagccttgctgcagaaaaagcatttcagttaattgaacatgaaatgtgttaccatctgataacattaataatatgtgatcgctactttgtatctaatatgcagttcatttggttggaatctaaagcattctataaatgttagagtatgaatcctgttgcaaacctataaactaagcagctctattttggtgcattttgaagtatctctgtgttagttatctatgctgtgtaacaaattatcccaaaacttagcagcttcgaacaacaaatatttattatctcagcatcaatcaggaatggctaagctgggaggttctagttcaaaggctctcattaagttgtagtcaaggcattggccagattaacaatcatttgaagacctgatgagggccggcagatccactcataaggtgtctaactcacaatcccagcaagttagtttgagatgttgacagtaaacctcaattcttttctacactggtctctccgtagggcatggagagatgcctgagcatcctcatgacatggcagctggcttcccccagagccaatgatccatgagacaaagcaaaacggaagctacaatatctttggatgatctagccttagaattcacccatcatcacttccttcaggtcctgctccttagaagccggttactaagcacagtccacactcgaggagagggcaattcgactccatcttttgaaggagtcttaaagaatttgtgagcatattttaaaggcaccgcaatcccctatttacataaggacagttgaaaatgatggtggcttacctgctcaaggtcaacgaactactggtaagaccccacctggaaggcggcaggcttttttatttattgtaaagcaaaacagaaaacccacattcttgaaataactgcacatgaatcccaaatctgtctctttcaaatgtccaagaccttctaaaagtggcaggatgctttctgtttagaaatggatgagatggacactagactggaagggtcagcctttgattaagagtcagctttcctcttaatcagctctgggaccatgagaacaaaaacacttttctaagggatgttttcctcctttgcaaaatatgatgggctagccgaatggtttccaaagttggtggcctttaagtcctctggggacttaaaaactcactgatcttgtgttaaatccacaatgtccaggaatctgtaccacttaaaagcacttggggactctggcggcctgttttgcagacagtaggaactgctcggctacatgatttctcactcttccacttttaacattattttatttatttttgagacagagtctctctttgtcacccaggctggagtgcagtggcatgattttggcaacctccgcctcctgagttcaagcgattctcctgcctcagcctccaaagtagctgggattacaggctcccgccaccatgactggcttttttttttgtattttagtggagatgggggttttaccatgttggccaggttggtctggaactcctgacctcatgtgatctgctcacctctgcctcccaaagtgctgggattacaggcgtgaaccaccatgcctggccaacattattttaactctccccatcagactgggtatgcccatgtaaattgttggttctccatcttcactacaatcatgagcagaatttttaaaaaatatgatacctagggccctccctaggcaaaatataagtcattctggggtggaactctggtaccatcacgggttgttggcttgttttcatcagtacatttaaaactaatcatgtttagccttgttggcacattagaatcacttggggagctttaaaaaagcccactgcccagcctgtcccccaggccaattaaatcacaatctcgtgggaaaaccaagaatcagcattttttaaagttccccaagtgattacaacatacagccaaactgacctatgtttgccacatttgagataattctaatgctaattcacctataagggattattcagaaaaaaatcccaacatttagatgccacagtactctaagaaaaaaaatgcatttaaagtggaagatattacaattttgaaatgaaagatattaaaaattaaatggaactaagttccatttctggcaatatggtagactaagtaacttgaaaatcctcccatcataaaccacctataaatactggtcagaatgtaataaacacccatttaaatgagctctcaggacagtaagcaaaggctctcagagtcaggaagaagagggagattctagcatggtatgcaagtaagctgaggttgagctggtcttaggcaggtttgctggtgttgggaacctgaggtttgagcatcaaaataggaaggagactatgcttaaggtccattaaaagtgggaaaatggaattcagaattcccataaagctggaatcccatcaagctagaacctcctgaatcactagagaaataatcactggaaaaataatctccccaatgtcacaaggaaacaagaaaatgtgcctgtctttgcaggggttgagggtggggaataaagggctttactgagaatttgagattataatgtggtatggtccaggaaccccaaagctgagaatgaatacagaaatacagacccaatgccaaactatacaatgtatgtggatataatcctccacaagcaagatgtagcagacacaaaggtcccaagaacctcaggtaacagaactatcaggcagactataaaataagcaaattgaaaattattaaagacacaaagaggccgggcgcggtggctcacgcttgtaatcccagcactttgggaggccgaggcgggcggatcacgaggtcaggagatcgagaccatcctggctaacacggtgaaaccccatctctactaaaaatacaaaaaaattagccgggcgtgatggcgggcgcctgtagtcccagctactcgggaggctgaggcaggagaatggcgtgaacccgggaggcggagcttgcagtgagccgagattgcgccgctgcactcccgcctgggccacagagcgagactccgtctcaattaaaaaaaaaaaaaaaagacacaaaggaacctttgacaccatgagaaaataacataacactctaaaaaaggtagattttaaatagaactaaatagaatttctagaaatgacaaatatagtcaccaaaatgaaaagctcagtgatgagttaaacagcagattagacagagtcgaagaaagaaccacagatggatctgagaaaattgcccaggaagcagcaaagacaaagtgaaggaaagtctgacagattcagagtgtgctggatagaaggagaagatgcattatacatttcatataagtaccaaaagacaatgagagggatacttcatttagagaatcccaagattatgcatatacaatgagtattgaatcagataaagaagaagaaattcatacttgaatatagcagagtaaaaatgtaggaagccaaagacaaggaaaaagtcttaaaaccagagagaaaagacagattacctacaaaggaatgacaattagactcatagcaaatgtttcagaaataaagaataggaagacatggtatattcaaaaaagtgctggggtaaaataactgccaatcttgagtattacacccagagaaatcatcattcaggaatgagagtgaaatatgacatgtttgtcttagcggagagagcgtaccactcaacaatcccctgaaaaaaactaaaggtatgtttcaggggaaagggtctatatctagaaggaaattggtaaataagggcaaatctaaacgatgaattgactgtatataaaattacaatagagattaaaattaggggtataaaaagtaggtggatctaaaaataagcaacagtaaaacataatgagaggatgtaactgaagttgaatcattcttagcttattggatagttctagggcatttgatttactttagatcacatgtacaggttaaaattgtaatcaccgaaagagtagaaatagaatttacaacttccggccagacacagtggctcacgcctgtaatcctagcactttgggaggccaaggcaggcagatcaattgaggtcaggagttcaagaccagctggccaacatggtgaaaccccgtctctactaaaaatacaaaaattagctgggtgtggtggtgggtgcctgtaataccagctactcggaggccgagtcaggagaatcgcttgaacccaagaggcagaggttgtagtgagctgattgtaccactgcactccagcatggctgacagagtgagactctgtctcaaaaaaaaaaaaaaggcctcggcctcccaaagtgctgggattacaggtgtgagccaccatgcccggccaatagcatctcttatacattgctagtaggagtacaaattggaacaccactttggaaaacagcttagtattaccttgtaaaattttacattcacgtatgttacgacccagcaattactccaaagagaaattctgatctatgtgcatcagaaggtaaaaatgttcataataacactgtttataatagccaaaaaaaaaaaaaaattcctgaaagcaacccaaaggcttgtttgtgagaatagagaaactaaactgtggcacagtcacataatggaatattatacaactgggagaaagaatgaactacaacctgatacaaaaatctaattttgttccccccacccccccagggccctggctagaggatctaattgattcttaataatttcatattgagtaaattatcaagcctcagaaatttttcataaagtttcaaaacaaaaagtaaaacaaaacaaatattagtcattgatatgcatgataaaactttttaaaaagcgaaaaatcataacaaatacaagattcagactggtggttactttagaggaacaaaatagggaggaacacataagcagatgttacataagtcaagtcattgtttctgttttagttctctggttgaatagcaggtttacaggtattcatgatatcagcaaataaaataaaatagggccatgagtatacacaatgatgatagtgtgttatactagagattgtgactaatatatttttgtgcccctaaattgtgatattttgtgatctttaaaaatatcagcaatcacaataaatgtaaatggactaaacttactagttagcacaataatgaaccagagctaactatatgctatttacaggagactgaacaaaaaatttgggacatggaaaggttcaaagtaaaaggaaagagggaaagagaaagatctataagtgaagggctaattaaaagagtagttacatttattacagacaaagtagactttaaagcaaaaggcattagggataagtatcttctgtgccaatattaaaggaataattcctaggaaaatagcaaatctaagctcgtatgcactgaataacaaggccttaaaatacacaaagcaaaaagtatgagaagcagaaaatgtatagttacagtgggaaattttaacagttctttttgatgcacctgacaacatacttttaaaatacagcaaaatttgagagaattacaggagaaactggcaaatctagtcatatagaaattttaatgtacttctataaaaaccaacaggtcaagctgacaaaatattagtaaggctacaggaaatctagacaatataattaataagtctgatctaatagacccatataaaatgctgtacttaaaaattaaggcatatacattcttttcaaatctacatgaaatatttataaaaattgactgcaccaaagcaagtttcaataaataacaaagaatctgcttcatatagatcacattctttgaccttaattcagttaagttagacgttagtaactaaagaataacctcaaatacccctcaaatacacctgtattaattcactagtcaaacaagaaatcgtatctgaaatctaatttttttttttttttaaacaggatctcgctctgtcacccaggctggagtagtgacatgatcatggctcgctacagtctcaacttcccaggctcaagtgatcctcccacctcagtctcctgagtagctgggcctataggtgcatgttagcacacctggctagtttctagaaaagttttcttttgcagagatggggcctcactatgttgcccaggctggtctcaaactcctgggctcaagtgatcctcccaccttggcctcccaaagtgctgggattacaggcataagccattgtgtccagcctaaaatctaaactttttttacctcattggtgataaaaagtctatatatcttgtggaatatagcttgagtggtacttaaagtgaaatctgtagtcttaaatgttaaaatcagaaaacagatggctaaaaattaattacctaaggcaacaattcaaaaaaaaaaaaaaagagcaacagaataaatccaaaaagagcagaagcagaagggaatactatatgatatatattaatattacattacatattatattctcacaaactatataatagtatatattttctattgtgccatatataacaatataatatataataatatataagaacaaaacttactggaacagaaaaagaaacaatattgaaactaaagtctggttctttggaaacactaatagaaagtagaaagaaaacattagtaaaaaaaaaagatctctggcacagctgatccagataagaaaaaatacatataaaatgatatttagaatgaaaaaaaaacattatggatagatagagcagagattaaaatacattaagagataactatgaacagcattttgtcaacacatttgaaaacctagatggtatggataatttccttgaaaaacatagtgtataaaaatagattcaagaagaaaacagaaaacctgaagagatctacgagcattaaagaaatggaatcagtagttaaaaatcaacccacgaaatgtctatcccagacccagacaatttacctgcaaaactaccaaacattcaaggaacacataattccaatcttacacacactgttccagaaaatgaaaaaagaaggaacatttaccggttcattttatgagaccagtataaccagacaaaggcagtaagaaaaggaaaaactgcagccaatttgacttatgaacatgaatacaaaaagaatcctagaatgaaattaaatgttggccatcattcattcattcatccactcactcattcagtcaatcattatttattgagcgtcaaccgtgcgccagcaggcactgtgctagtacatggagagcagaaaggcacgggagcttctggcttagaggagatgggcaataaagcaaatgatcatacagggtaaggtacacagaggacgttctggtaaggtaactgcatatcaaagggcattcgaccctgtcagagaggtctgggaaagatttccaggcatgtaagtggagtaagggtgtatgtgggaagactgttttgtaagctgttgcagggcctcaggtgggagatctgggatgcagcagcaagaaagatggatttgaacttgggcttcctttagaaaggctaagtggagatgttgaataggaaattgaccagagcctggagctcttcaggaagggtggggctggagatttcaatttgagtggcatcaccatgtgtttaaacccatcctggaagattgagtttgaagaaggaagtgtccaacattgtcttgggctgttgagactttcagagggttgaggactgatattgtgctgcttgaattctcctgatgcaggggctacattgagtgagctggagaaaaaaaatgcataaaataataataataataataataataataataataagctattacaaataatgtagagcaaaggggcagcaagagggaatttttttggacaatgaaactgttctgcatcttgattatggtggtggttacatgactctatacatatgtcaaaactcataggattacagaccaaaaagagtaaatattaccgtatataaattaaaaataaatgagtaaaaacaatgtagtaatggagacttaaaatccagttctttctaagccctgactttgtaaccgcagctctagcccctctctggattttaaatcagttctataagtgtcagcttgtggaggtctataccagacaggaagggcccccaactctcgccttgtgagggacagaataaacacgcaggcagcagaggccacacggcattggactgatggtcagagggtgggggtggggtgtagcctggtgagtttggcacctctgagacgctgatgtataatgaggggattagattaggaaaggcctttctacctaggatggcctgtggttctactgtaaaaatcccaaacacaatacaattagctctgttgtctgcattttgtttagaataatcaatcataataaacaatcattgtaacaactggctgttcaacacatgagaccccagatgatttgggaaggagcttggagtgacaggaaatgtttgggtttgtggtttaaagccttagagcaccttctcaatatgattatattgagtagtgattgataataaacacgactcaggtttacagtgaaaaaggaacttttacaacattggttcacttcagcctctcaccttcaccacatcaatcctgtcaaggaggaattactgcaatttagggaacagggagactgagggtctggtcactcaaggctatggctggtgttgagattttcccaatattccatttttccaaagcccacagtggatttggttcagttttggtgttgagtgtattcctttgtctcctaatcctatgaaaattaatggaaaagtgttaattgggcatcaattcatgcttaacattaatctcagtatttgatgaaccacaactttatgttgcccctcatgccatattaactcagtttattgcaacaatttaaaacgatacagatttaaaacaatatgggtaattgtatccgtattgtttcaaatgccccataaattgaaaccagcccgaatttgggcagtctggaatctgccggagaaactttcatgcgatgcctttggaaggctacagacattgtctttttggagttttcagtgcatgaaggtatgaaaccgcatttattaagcacctactgtatgccagaacccgtgctgcacaatactactgctgctaaggtgggagtgattctgaagccttctgccaccctagctacctctgcaggtcgtgaggggtcttgggctatttcagtatcatgcactttactatcctggcatacaaaggctgggtgagaaataaaatatataacgaacggattacacaggggtttcctgaaataaccacccttcccatccatcccagagacaccccaaaagtacttctcgttatatacaaacatttgctttgaacctcaatcatgtgaccttgactcctataacctatcttattacatttttaaaacactgtatgattaacgcggaaaccctttcttcggcactttctcgccactggaatcgcgtcagtttctcaaagttccaaaataacctttcccgggcacggattggtacctctactggggaagggcggggaaccgcgcaagacgtgccggtgtggagccagagccagagagaacttccagcgcaaaaggaaaataaaacttgtggctggtgtttgtgcaggagggtctccgccatcctgaagccccccgatcctggggcgtctcgggggccgccaaaggagcgccagggtgtgggtttgctcccgacgtccttgacctaaatttctgagcggtggctggaaacagggcacagcggagggcgggcggctggtgccattcccggatctcggcggcaggggccggcaaacttgaatggagagggcgaactagagagggtggggggcgtcttctcccaggtccgggtgaggagccgcagcaagctccccgcgcctcccctcccccgatccacccgccccccgcagcccatgtgatccagggaagtcggggtgcgctccccctcgccctgcgccctgccggcccggaggcggggtcccctccgcccgcggggttcgcgcgccacccttgtgggtccggccgtggggggccgagtgtgcgcgcgcgggcaggcgggggccgcacgggggtgcgtgacgtcaccggcattggttacacgacgttctagaactccgccccacgtgcgccggggaggagggggaggaggaggaggagatgggggtggggaggaggagggggagaggtggggatgggccgggggggcggggacgggggggtgtgcgaggcagcggggctgagctaagccgagcccacgtgtgacggctctcgccgctgccccggctccgccgctcgcagagagattcggaggagcccgggcgggggggaggaggagggggaggagggagcggagatctcggggctcggagccggccgccgctccgctccgatcgctgtggggcttggttttttgggggtgggggggcgggggggctcagatatggaggcaaatgggagccaaggcacctcgggcagcgccaacgactcccagcacgaccccgggtaagtttccagccgctgcccaccgcgccgccttgggctcgctctccttgcagcggcggggacggcggtgcgcggagccgggcatctcccgcgcccccccgcctctcccgcgcgccccccccgtggaagttacacacctttggattgcatttcgccgtcaccttctcccccaccccacctcccggctctcgctcgctcgctcccccccgctttccttttagcttttgtaagttacacgtcaaaatggccgatctgacatcggtgctcacttctgttatgttttctccctctagtaaaatgtttatcggtggactgagctggcagacctcaccaggtaagggagggagggggggacgcctgggtcccccccttcttggcttctttattgctctttgttatcccggtgtaggagcccccccccccccgccattggctccccacttctcctgtgcaaggttattttttttaaatagcaaatcctttctgagccctctatgcgacctctgttgccgaatttcccccgcgtgtgcaaaaaatgcaaaaacaaaacagaataacaacagaaaactacttttggattttgtccttgatcaaaatttgcattgctttttttttccacaccttctctcccccccccatctctctctttctctctctacagatagccttagagactattttagcaaatttggagaaattagagaatgtatggtcatgagagatcccactacgaaacgctccaggtaaaccattcccttctggattttgtctttattttagaacaaagtttaagttttatttttggaggtgtcttcggaagtagctaagcggattagaatggggctcaggcgcgtggctgatctcgaacggcgctctataccacccccaccgccccctagtaaccccagaggttattgttaattggagctgaactctggatacagagatacccatctctctgcttttaagtcattttcccgtcgcttctttttctctgtttaaaatgacattcagcttcatttactttcgcatagtttttttttttcttttgatcttaatgtgtgtttcccccacactcccagctccccaaactcttaagatccctcttagaaagatggtggtaaatctcttctaagtgccgggctttcttcggaataaaacaaagcgttaagaaagggaaggggaggaggagaggaaactgaggtggccaaagagtggaggcaccagcattttccaagttacctccaccctccctgcccccgttccacttcccccgttaaccttgatgttttttcttgcgaggtggagggctgtaggcaggaggggaattggaggaggggagtgggaggtgggggtgcgtggggggcaacttttgctcctcattcagccttaggtctcactcctggttgctttcaatggtgtcacattttcttgtttgtttttctccctctttgtctcctttcagaggcttcggtttcgtcacgttcgcagacccagcaagtgtagataaagtattaggtcagccccaccatgagttagattccaagacggtaggttgctttttgttgttgttgttcgccccttttcaggaacgatctgggcattgacagccccatttaaagggacagtgccttcttttgcttctgtgctagaactgggtagttttaaactgagctagcgagttggctcaaaagtttgctgctgtggctggctttggggttttctttttagagcctgtcccattgcagcttcagaggctgccaaggttaggcttggggaggagagggttcggctcctggagagtctgccttcccggcctggggactgtgcagagaaactccaccagagagcaaatgcaacttttctttgtcagccaagcacagcacgcgttaccaactgtggctgtggggatcagctttgagaaggcacagcctgctttgtggccaagggggacagcagtgggaaggaggggagagggcgctaattacaggtccaggcaacaggtttctcttggggcacttgggatttggaatgtgctttgggaagggaaggggacgctggcggagctgagctgggcatccactggggtgactccagatggcatgaaatctaaggctgataaggcctgggggtttcaaagtgatttttttttccttccttttctttctcagatcctttcatttgagtatgggtacttttatacatcacaagttttaaaaatccagagtagaagggggaagagtctccaggcagaggtcagaaggggaagggaagaaagagtgtctgtatataacaatacatttaatgggagggggagtgtgcagtgttttatttagcccctgtgtgggcttcctgcctctcctcccttccctttatgtctaccagagtttccccacggtttttattaatatatatctgccccaaacagaggccttaagatgacattgggctgtagtgctgggttgcatggaacttcactcctctgtgatggggtagtgggacaaggccagaaatggggctctacttccatccgcctcttatgaaagtgagcaagacattccctacctctgggtctcaatttcctcttctgtaaaataagtggaccaaggtgatctttcaagccccttttggctttaacattgaatggaagagaaggaaagcaaataaagaaacctggcaaccttcggtgcacttgaattgattttgcaaattcaccctctttctctgatcaaagagatcaggaatgcgtgccttctcctaagaaagaaacccacctacactcttagttgctttattaattgtcctggacttgtcatagcttgcatgcagcccagccttttgtacttttagataatttaatttcagaaatgatttgtaggatgataacagatgtctgaaaaatttttctctccttgatttcgtggctagccatttcaaaaagctagtgaaattaaagaggaaaatcttttcaaggcaaatttgggaatttatcatccaccccctcttgctacctgggtgggagaaacagtatttggtttctgtggtggctggtgggtcatattcctctgtatcaggtgcaaagcctgcagtttccctctctgattgtttatagacatgttttggtcactattatttagtgtaacctagcttttgactttgtttcaacgttcagtgcaggaggcagaagcggttggtttattgacatggaaacgaggatcttgtttactgttaccttaaaagctttgtttaggtaacggccattcacatccaaaatagtaccctagtcttttcctagaggacttgtagatacagtaagtagagctgtacctaactaactaatgttttaatttttggtagttttcttttttgtttgttttttaaaaaatagttgacagggatgtgcaaaaggttgggatttgccatgcttaacttgacccttcctctccttcagagatctcagcgtgtaaactttgcacactgaggaacttcgatcatgatataatgctctgatacggccacacaccatccaggagttctgaattggctttttcgttttgtgatttaaattttctttagtacttcactttcttcattgcaccttacttcttccagctcctggcacctccctcaacataccccacacctgttaccccataaacaaggtgatttctgattgcaattgtgtgccggccaactaaaaaaaacaccctctggggagtatttataaaaagacacctctgtcttacgtacgtcaacagaatggaaaatccacacctgttgtatttctcttgtagacaagcgctagtcagtgctggacacacctgtagatgcagtaatgttaatctttatgaaagggtagttttctagatcagagatttttgtctattttagtttttgaaaagtaatctctcatttctcaggtgatgtttaaaggtagggaatgcaatgcagacttttattaggtctttaagcccccgtaataacagcaggaaatcctcatatgtctttctggctgggaccctaggtgatgtaagtcagggaacaaatgaactatcctccgtgcttcccactccccacccccacctccctactttcctccacagcattactcttttctcccctgctccttctcatggcagaagtgaaaacaaagctcagatttactttttaaaaggaaaacattttaatatgaaagccaaagcctggaaataaataactggtagcatgtttatactatctgtgttacatttttacccaaagatttgtgacatttagaaattcaatgaaaaccgacaacgggaatattttcacatttctttcctcctctttttatctgtgcagtcacttttttcctccctcacatcagcctgttagattcacatgcttccaggagaactgttctgagctgtacagctagaccctgattgagcatcatgcgttttgcaagtgtgtgatttggactggaggatgtttttccactcggattgaggttggggtaggggaattccctacttgttgcactagattctgactacttcttgtattcagtaacttttttttttttttggtgccctccccatgatgggatttcttttctaatttgggtttaggttgcttatagatttttactccctgttgtttttaaaatccaggtggatttagctcacatgcttcattttctttacttcaaaaaattattttttatcttttgaggtatagctacagaacagatgatctttttggttaatcctgggtaactttacttttgctaaaatgaattaattaactcaagcagagcactgtgttggatgtctgtggggagtttttggatgttgttgatttaaaaaatttttggaagctcctttccctcctgtgttgtttagttatcatcagggagaagaaataccatccaattacctactgctagagaatacttacatttaattttcaggttatgatttttttcccaatgataatgatgctcccatcttttctcccagccacgcatagcaaattagatgtagataccatttaatattcagtgtctggaagaagaagcccttgcctaaataagaattacatgagatctggtttattaagagcatcacacactgaaatgcatggtgggtcatttcagaaaggctagctagctatgttagttacctgatctgttggagggatggttaaagttgagatcaaagtttaagaaacttttgagttgcctgagaagttactaaaagctggattataagcctgagaaatgagtgattaataattaggtgattaatcatatattttttccttaaagtactttattgactcctgcttttctattttttttcccagattgaccccaaagttgcatttcctcgtcgagcgcaacccaaggtaagtaggagaataaacagtaggattttagcactcagagatgattgccaagaatttcaaatttcaaacagcattggccatgaactgttgaagcctggtattcactgttccttcggggtatcaggacaggctgggcaagtagtcctgtgagataaccatgcgtctctaagttagccatcccaaggtggcttctgaacatccacctgggggcagggacaagtctgatgcttagtgggaggacgtgtttccatcgactgcagtattttttgcaaggattctatttgttttttaagcatttccaatatcatatcaggaaaagtcgaacatttccttgtgactctttcggagggtactctttgaggctttacaacttggagttaatgcagaggagtagagtttgactaaacagctgatcctttcttggaaaagacaacttcttaggcccataaagccttaaatctgggagggcaagcagtggatatcttggttttaggttggttggataagtcagggcatacttgaaaccaacagtgcttcttatttgtgcaagtgctggtgcctgggtggagaagtcctgaaaatgttgtaaccttgtaggagtggcactacaagacttgcttaaagaattgagatagggcttcacttttttagaagtgtgtcgttaacatagttttcactgagcttgccaggtgtggctatgagaacacagttgcttgaagcctaaggttaaattggaagggcttatggcttacatgttacatttacactttttagttactatttttcttccttatgtagcactggaagaaatgctttttatgtatcttcgggatttgtcattcttttagggaaaggggaaaagttgaagcttctaagtcggaaaaggttgtggctttagcaaattcagtttatttctttatgcacagtctcccagaagtggaaccttttaatcgtgtaaagagaggaatggttttgcacattagtatagaaaaagttggtgattgtgatggtactttgagaatttcaggtctggggcataccacttgattgattgattccttccttccctccttctttctctccctccctccttgttctcttctcccttttttaaagatggaaacacaactttttaagtaaatacaatgaaatattttcttcaggcatttttttgtaatgcttaagcaaatgataggaattaatgattaggttatttttgtacttagcacaaactttggaattgcccttattgttttagttacttcccaaactgtctgtgatccttcacatttcagagggcttcccagagttagcagtatttcctgggtttggaggaattgctgtttcttccataagtgtgaatcttcaaatttccaggttagtcatttgatcactcagagcttggatcagattacccaagagggaagctggaaaaatcccttacttggtaaaaccatgggtttgacctgtttttctctcccctttgttgtcccccttccttaactttgtttttaaatgagaaaagcaatatttcactttaatacactctgcagtgatgcattcaacttgaaaacgagacagaatgtttctcaaacttgtcaaagtgtgcattcctttcccaaccctcaactccacatctggaatgtttgtaggtgaattaacatgaaaccacttgggggagaacatctttccatgaattctagggatttaataataacaccttactgtgtatgacatacttcactttacggaggacttggctgttcattatctccatctgaattccatctcctggggcatttggctgttgtccctaaccttctctcagtctcagtgtgctcatctgtaaagtaggagtgatgacatagctctcccagaaggtttttgtgtagagtaaaagagcatggtctgcgacaaaggtcttcgtcattgtcattatttttcttgtcggttttctcatcattgttccggttgttgtttgcaagtgggacagcctgggttcggatgctggtggtgccactccttagctgtgtgaatttgaacaggtcgtttaacttccttgaaccttcgtttttccatctcatagagtttttctgcagattacgtaaattaataaaggtaaagggactgaaaaaaaaaagacgttgcatggtaatgccatagaagcgttaacctgctatcttatttatttatttatttatttttgagatgggatctcactgtgttgcccaggctggtcttaaactcctgggccaagctatcctcccacctctgccccccagagtgctgggattataggcgtgagccactgtgcctggccaacctgctatttttttctgccatttttattaagtcctcacatcaatcctgtgagaggttgagtaataataatgatactagttgaatttatatgccaggcactattgcagagactttattaatccatttaattctcatgcagccctatgaggagagtactagtatgagctcattttgtaaatgaggaaacggaggcacagatggatgtccaggagccatacccaggcaacctggctgtagaactgggcccttcaccactgtgccatgctgtgggggtacctcaggggatggcccctctgctatgcgacaggagatgggctcggagaggtcagcgggctgtgctgagggaaccatagccagaggcccagtactttgaagttctgcgttcctgggcctaggtgatttgccttgccccatcatgttataccagtgtgtgacactgtcttgtatcttttgatctgacccctcaggccatcttttcagatggttctggagttactcaaccccagtgaggcaacagagtaaatgccaaggttgtatggtggttgggaattgggacagggtggggagaaagtgtcttccctgtctacggttattttccaatagaatttgagcctggccaccgggatttcagactggagttagcgctgggggccaaaacccaggagcatagaactttaagtcgaccctgatttatttatcgattatctcccttcaataaaacttctgtgtttttgtgttcaggtcacagtggcagagggaaccctgcccctcctcgtgggatgggcgaggagcttgtaaatgatatgtcagtgtgtgtttcagttaaaatgagtttctctgctttctggctgtccctccttgctaacgctcgccagagaaatattccgtggaggtgttaaaacaagactagtggaaagaaatggtaacttaaaaagaaagaaaatccatggcagtgaagaacagatttcatattagtactgtcataatattctctaatgtatcatataaataaaaatctgtttagaccagaattttaataagtcaccaaaggaaggttttgaatcctacagtttatgtatccccctttgcgatgtaaatgttcacatctcaagtgaagtagagtggggagacgcttcggagactagaggctgttaattagtgaggtatattttgatcagggcaagaagactggttcattctatatcttcgtatttctctggatgattatttcattttgtaaaatatgtaagagttcccccccagccccttatctttttaaaaattaaaatggtcatgctcttctaaaaagatgacttaatttgaaggctttggagacatgaggatgatggggatccatcactccctgttctttgctccctttggactggagtgttggctgtctggaagagttttgcttgagctcgtgggttattttcttctatgtggaggaaccaagagactctttagcatctttcagcaagagcgaggtctgggtgtactcaccatctgtcttaattatccttgtgtataagaaaacattcccatcttttcccaattgccatttccttccttaacttttagaggccagaacctcatctgttgatgcagggagatctcacttctttaacctatttctagttgccttcagtcacagcggggtggccaggggcgagtcacttaagcctccccaaggctcagtttcctcctttgtaaaagagggagaattatagtactcactgcctgcagttagttgtttggaggataaatgcaaaattcttcactgggagtctggcataaaacagcactccgcaaatgtctgttgatcttattattatagaattattatttttattattattatttttaagacggagcctcactctgtcgcccaggctggagtgcagtggtgagatcttggctcactgcaacctccgcctcccgggttcaagcaattctcccgcctcagcctcccgactagctgggattacaggcacctgccatcatgcctggctaatttttgtatttttgtagaaatggggtttcaccatgttggccaggctggtcttgaactcctgacctcaggtgatccacctgccttggcctcccaaagtgctgggattacaggcatgagccaccgtgcccgaccagataattattttaatagaataaaaaaaagtacaatggtgaaatgactgaaggaaaatcttaattggaatgtaagctccctgagggcagggaactgttggtggctgctgtttggtaactaaatgaacgaactgagtccagcctgcttttttcaccgtggaggtagctgctacccagtaaagttacgttggttgcttcagatccacacttaggttgtagcagggctgagctagcagtcaggttttcctgttcctgtcttgtcctctgacgtggcttcagggccctggaaggttctctgctaagcacgcatccagatgggtgcaatggcagcccgagcgtgtacacgcacacctcctgttctgggggagtggtttcttggcagcttctcaagggcgaagggtgagttttcggcatctggccttcccttgctgctgtgggtcgggtcattctagcatcttgccatcttggatgatctgcagctgtcatctcggcagccaccatgaactggcctgccagtgggttttctcgttcccagcgaggatgtggtggtgtgtctgcagcccttttccacagcagcgaggacctgggaggattagtggcttagcttctttcttgtcggtgagcaccgctccttcctatgttccaagtcagtagcaggtgtcagcttaaggaggaggggcaccttgtcctacaaatgtcctttccctggattttgccgttcctcacatgctttcgtttcattgttgaggtcagtctcctaggactatgaagctcctgtgttctttgtcagatgatttttggcagacaggtgagcctcctctgctgcccgggaagggaggagaaggcagtctcggaggaaccagctgaccatctcaggtgccgcttggggcagcgtccattctttgtgtcctattttgtatttttaaacccggacaatcttcggccgaaaaccccgagaacacacaggggagatgtagttcatcatctctctcttcccgtttgatctagtgtgttcatttaacaagagctgggttaatccttgttcattgccaactgtatgcgtgcacccacttttggagggattcaggaaatactcggtgcttcctgatgtgcatggaacacagtctcgacgtcttagcttggtgcttaattaaggtccttcaaaatctgtaccagggtcttttccaccttatctctcaattcttctagtttttgctgccttgaaactgaatgctcacccttctttgagaaacctgtccttttgcagatttccctctctgcactgcccttcccttctctgtacacaacagaccctctttgaaagcccagcttcatcattatcttttccacgaagctgtccctgcccctttgtggaaacagtcatacttctttggatttccacagcacttaccttttctttggttaagccccttccaacaataataaattagcagaaacttgtggagcacatacatctgttgcatgttgtgctagacattcactcattcatttattcaccaaacaagcaccgaccgtttgccagatactgtgcaaaattcgggggatagtgtggagaatatgacaaagttcctgctgtcaccaaacttttgctctagtggggcaaataagcagtgagcaaacagataagtttatgacatgctctcaggtgtgatcaccaaagccagggaggagcgatggcgggagtggggtggaccatatctatggtacagtcagttgccactttcagtagttcagaaattatttaccaagtttctgctcagcaccggggattgcgttaggtactttgttctgagttttatggtatttaggttcatgccttatcttctccattggacacaagcatattttactaataattaaaaaaaaaaaaaacccagccaggtgcggtggctcatgcctgtaatcccaacactttgggaggccgaggcgggtgggtcacgaggtcaggagttcaagatcagcctggccaagatggtgaaaccccgtctctactaaaaatacaaaaattagccaggcatggtggcgggcacctgtaatcccagctactcgggaggctgaggcagagaattgcttgaatctgggaggcggaggttgcagtgagccgagattgcgccactgcactccagcctaggtaacagagcgagactccatctcaaacaaacaaacaaacaaacaaacaaaaaacaccccatccttagcccttacttctgcacttttgtacatcgtggacttccatttaggtagagcgaatgaaaaatgccagaagaaacacagttcttgtctttaagaacatcattagctccaggttgggaggagggggtgacctgtgatactggaaagggtgggataagcacagtagaagaggtaggaacagcattttgaggaagggcaatctaagcttctaggaagaggtggtctttgccccaggtcttgaagatcagataggaaggaataatggcaggaatgctgttcttccttccggctaggcactaggaaaggtcagggtgtgcaggtgttgcaaagggtatgtgctgcagagtggcctggcatgaggcttgcaaagtaggttggagccagtttgtagaaggcctcaagggcccaataaggcaaactgacaggtgctgtggggaacctgttgtgtgtctgtgcgggtgtatggggatgccctgtggaatgttctgagctcattcagacccatatagaagctggggtcactgataggaccatggcggatgctgttgcctggagaacttccaacctgggcttgtggcttaagcttaatgcaggctatgttctctctggccagagtctctcttgccatagactcttcttcttcaggagtgatgctcttagcagatgccacctctacctttggggtgtgtggctgcttacaaagagctctctcattctcttgtttctaccttctgttctctcctcttttcctccttaacaagggaccatgatatagatacaattccaaagtcctgtactttgtccttgtttaagccgtgatcgtgacctcaccatgtgtagacagtgagatgtcatttctcaatgtggacatcacagattgcctgtataaccccagtgtgtgtcccgtggctcagagcagtctgacctgtgacttcatagatggtatctgcttggggtcgcctttggctgagtgtctgcttggtgaagaatatgcatttttggaatcatgatctctgctttccgtgtggtgtgaagtgcgcaggtgtggtcttggggctgagcaccctgtggtatgttgtagcagcagcctcacttggtcggtccagctgggacagttgtcccactgggtccagagtaggataagatattttccattctcccttcttttgaagatagcaccaggcttccaaccatctggaatgttagccttagggtggatgcctggctgctatcttgctttattttagctgtgagattttgaatagttaaaaagaaaaatcctaattcagaataatgactgtcatttattgtgagtttatatgttataggcatagtaccgagactatacacttagtcttctttaatccttacaacaatcctttgaaatagttggtattatctccgtttgacagtgggtaaactggggcctgagagggcagacagctttctagaaccatagaactagtaaggttcagggttggcctttggaccaaagtctctctgaatcccaaggctttgttctcctctctgctaagccttgctgcatccaacatgagtgggcagagttgaggttgccactttgcctgatggctataaaatgctcaggctgaggaatagaatttgtgatagtctagctggaaagcttcaggttaatttttgttacctgttttctgagagcttgtttagcataggtaagtgccacttaccagctatggcattttagacaagtcacttagtggttttgcacctccacttgtacctgttaaatgggatagcaaccgtccctccattgtagaattgctaagggtaagatggactgagctactgcatatgaatggcctagggtgatagctgcatgttgtgggtacagtataagcattcatcatctgttactgtccccgaaaaatgtccctgcccccatcatcaggggaccttataaccgagcagctcgtgggttgattagcactgttgctcctttctagggtgagggatagaacagcacattgagattggaaaattctgtgtcagtggcttggcctgctcatgaggtcctggctctcgaggcgagatagcatgcagcctttatcttggggatgcttgatgggcattaggaattcatttccttttccgtatctgatgcctgtgtttttgctgcctctgagagtaaagtcccggggagcagctagggaacagctgagacactgctgtgtgagaggtctccccatgagtcttctctctccctgtactggtctttatctgcccgggggtagctctaccaatgactgatctgaaagcatcacattcatttatttgtcactggctgtgacaggcaagttaatgctaatggattctttttttagcctgttgtctgggatgagtttctctcaaacgtcctgaaatctaaggcattaggagaatgtgtaacttttatggcaggggaggatttataaaataaatagggttttgtgtgcaaggaccttaaatttaggttaggggtatgagcagccaaggagcgggggtgtcgggcaagcacagagtcttctttttaagaaatccattcaagagctctaaattgctgtttctgtttcaattatgtgacaatttcaagggtttagaaaaatctaataaaatggtcttgatgatgcattctggggagagagtgcttcagaagatctaggagaataaattccttgggggtcaagagattctcgttcctgccaccttgggccttccttcatctgggtttttacatttttattgttttgaagggcagaaaatggtgtaggaatgtattcagggcttcatccataccctccaccgaaatgaattattctcttttggcaattgcaaaatagacgggccactgcaatctttttttttttttttttttttttaagctgacatattgtaaacgactttcagaccatgatttgtgtgtgtagtgatgttgaataaagcaccaaagaaaagaaactgaaggaggggaaagagtgaggagggaggcgctataaaagtttttttcttttctgccatcaaagcttttgatagtttcctaaagcacagaagtttacaatggaagcgggcttttgggccgcctaggggaacagagtgcagaaagacctagtgtagcaaaatgtgatgctgagtgacattaatgaggtgaccgctctggtgggagggaggcaaggaaccagccaagtagcagttcccatgacttgctctcagctgagtgtttccttctgcatgcttgcatgggcgcctgtgtgtgtttgtgcatgcacacgttgtgtttcctaagtcttcagatggaatttttaacaacaaaccctgtttggtttactgtggtgttctccaccctaaagaggccgtgaatgttgagttttgtcctttattcccacctgctgaaaagtaaagttttcaacttagcggcattttgtttttactttctggatacctgccggagcctggctgggcggcgtgtcaggccaacatcacagagctgggcactgttggaacaccaaaccaagagtgtgaaaagtcaatattctcatttctgaaatgaattccagggagaggggaaaagaaaacctgttggtgtacagatcccgcccctccaaaggccctagatcgataacacttcatattggtggcataattaaacatggcaacaactgcttcttaaatatttcagtgtcttggaaagtaatccgtatttccatgttgctcttgtgcaagaatttccactcactcaagaacaagaaaagctgcaaccttgggggtagaagaaggtgagaaacctaggtcttgctgatttcctggataggagctcgagagtacctggctcagttgcgaactagtttcagaaaggaagctcgtattttcatcccattcctcgccatggcattagagtgaccattctaaacagtactgggcgagtgttctgaaaaactgctgcgacatcttaagaaaaatagccagatagggcctggtgtatagtggagtgggtggaaacacagtgtgtatttactgatacactctattttttaaatccctttcaactcagttccctctgggatatctctcaaatgtgtcctttttgtagctagaggcaaacaagcaaaaaatgtttcaactttcagatatactacttaataaaaactaactagtggattcatcatgtcttctacctggggaaaaaggatcaaattaggatgcttgcacctaggagagaattgggttgtgaatctccacgagattgctacatgtatatgtttcctcttctgttttccaaagaagataattggttttagtaagaacttctgacttgattagggggcccttaggaaattagagtgtgtttgaatttcacaagtataattttaattatacaaattttgcattttttcactagggagccaggttcagaacttgttttcctgtactaataggggtagtaaagctgattatggcagaatgctttacttaaattgctttgaaaataaaaatccttggatttgatcattgtttttccctgcagtacacgatgttcaggttaatgtccatacacgtcccatattcttgttaaaaatgatttttttttttttttttcttttactggattcacacaactgcagaacagactgacatagtggggatgtgggtggggggggggacctcattatgaatttttctgctgcacttgctgaaagaattcaattaaagttcttttgagcacaagtcctgcctgggcagtttgcgtttggcaggccatcgccttagcatgttgtgattgcctttattgccacgtcatcctgtttgctcaaagcctgtgcattcacagcattagccctccaagcggcccctctgcagcatgaccccagtggattagagtagaaggtgccgtggaaacagtcacctgggtctttccccaagctataaagagacggtggagtgaggatgatcagaccccctgggcatcccaagagaaggactgattgtgttcatgggaaataactgtttttttcagggctatccagacaaaacccccaagtgtcagagcgggggaactgctctgagagtttgaactcaagcatcctcaaacatctaccccagtgtggggctctaaaaagcttcctagagacctgctcctggggccttctgggccttgtctcagatattgacaggagagattcaatagaagaattcgttcacaatagagaaatcatgaaaccagcttgtgaatgacgtgatgccacataggccggggcctgagaatatgggaaaacaaaactgcaaatagaggctggatcctactcaccccccatcaccctgcattttacacattgaagtaaaatgttatttttactgtcgttatttttattactttctctccaggtgttctagctgagcgtttaagagcatggactctggaaccagactttgaatccttgctctgccactgcagctgtgtgaccttgagcaagctatctaaatattctgtgcctttgttttgtcatctgtacaatggagatgatgatggtatcaccttcatggggttgtcataaggattatgggacttaacataataaagtgtttagaatggtgtctgcaacataaggaagtgtatgggtgtgtgagttgtggggttgttagaaaggagcacgtcctgtggcaggtttgggtaagtgctccgtgcctgccttacgtagtagttggagaacgctaagtactgctgtcttctgccttacgtatttttccttaagtaatgtttgagaaatacaaaagaagacacacacacgtggttgtgcgtttatgcatataaatgtatgtgacacgggtagaattgcagtgtaatttggattcagacaaattcatgtgccataacgaagtgtgtggtttgttggcagcacgggctttggactcagagggacctagtttgaaacttgataactgccactaactctgtgactttaggaaggtgttccagcctttctgggtttcaattctgtacttaaaaaaaggggaatagtagggttgtggggattaaatgagccagtataaataaggcaccaggtgtatgatgaatactgagaaaatgtgaattcttttctccataaacaacaaaagaaaaattttaaagccatctcgaacatgggaaagatacaaagtgttctgttcttgctggtgatgagagtatctgaagttagttgataagtccttagaggtctgagtagagaaaagcaggccataaaagagggtgttgtcatccttaatccacatgccaaagggctgttttagcaacttcatttcacaaaagccacattttcaagggcagggaaatcatttcagttaggaaccttagatggtgtccccagcctttgaagatgcctttgttcctttgacacttggtaggaactgggagcacagggctggatggtccaagaggagagagtaacttcagagacatgaaagagccccagctaggagggagcgagggagaaccttgggattgagggcaagggttactttttcatagaaacttttgcttggggatatggaatagtaggttttgatctacaaacccatgagccctgtcctgtgagtgggaagaagattggtagagctcaggaaatgaacacagttcccagccattggcctgggagatgctgacgctcagacctattgtcggggctgggaaagcccccagaccccttggggcatcccctgtatgtgggtccctttcacttcatgtccactgggtggaatttaccaggtattgctgggaacggggaacaagatcatgattataagtggatcctggacaggggatggagtgcgtgtgaatgttagtgtgtagaggacggaaagggaaggagagaaggggtggccaggaggagggaaatagcagtagattacattgactaattatagggaaaaagccatatttgctgctccattaagtgatcactaggctatgaagcagtttattgtaattaatgcagaaacagcaagtaagtgtttgagtttggagtggagggtcttcaggaccccctccctccttcagttctctgtgctcactgtctccctcccctccctcaaattcattatccttggagagaaagagtcttgggggagcatctctttgggaagggctgtttagcacagtcttggaccagttttctactggtttattttgacaaagaaggaagatcttttacctgacctccttcagaagattctgtaggggtttttatgttttctaaggctgaaggaggagggacaaacccatgtcatcattgctattcttgccacaatcattttaatttcagcacatgaaagtggcaggttacacatccaagtccatcgagttatgggccgtgtggagttgtgattgctttccttgatgatttcttgttcaaatcagcagtgctcttaattttccagatgaagtaaaaagaaaattggagactcccctcccgcctggcgtctcttcatccaaggttttctgagcatgactctgatttggagggttaatattaattaggagccagtttagacctcagttgcttgatgaggtagcttcaactgttgtcacgaatgtggctcctttttgcttgtgcctgcttttggtgaaagtttctgggtttaaaagccaaaggaagaaatatgcagagaaagatagaggaggggacaattactaaagaagtgcaaagcattctcttagaacttgagggaggaacaagaccagagtgcctgggtgggtgtgggttctgagctactgtgtttcccggcgtgctgccgctgctgtttgcctcagtttccttttttgtaagtaaaggtcatctctctagcttcctaaaagggccatgactcatttccttggtttccaaattgggtgacgctagaatttctctgaggcaagtccctggtgagtgccaggtaacggaggcgcctcatttttgtgccgaggctcaaggtttcctggctcccaagttttcccagggctgactcggtctcctggggaacggtggcagaaaggatgagaccagagacagtgagtgagccccactgcatagtcaggggaaaggagacctggagaggaagggacctgttctccttgggttgtatcatgttagggacctttcttctacggactgggggtttgggttggttttcttttcttttttttttttttttttttgagacaaaattctgctgtctcgcccaggctggagtgcagtagcaggatctgggctcactgcagcctccgcctcctgggttcaagtgattctcttgcctcagtctcccaagtagctgggtttacaggtacccgccaccacacccagctaatttttttgtatttttaatagaggcggagttacgccacgttggccaggctggtctcgaactcctgacctcaagtgatctgcctgcctcagcctcccaaagtgctgggattataggcatgagccaccgcacccgggctggttttctttttgacagggtggtttgggtcgtgagggagtatggcagaccatgggtgtgaaagttccagtcctagcaggagagacttgacttctgtctcttggtctcttagcccaatgctgatgtgctgaacatgacctcaggcactttgccttgcagctccatgtttcgatttccccatctgtagacgggaagaatgaaggcatgtggtgggaagcagtgctgattagggcttaagagaagaggcttaggaggcagacagtcttagggtttctttctggcataatagtttcctagctgcttgaccttggggagttcacttaactttgttagtcctcaatttcctgatatgtaaaatgggataataccatatgagcatctacctgacaggattgttgtaatgtttacaggagacagtgttcgtaaagtacaccgcctgggaggtggctagcacattattcctgggggctacttttactattaacagctccatagtgatttgaccaaaggtttctgagagttgagccaagatgcggactagatgggaccacattgagaaaacatttgaggctggatgcagtggctcacgcctacactctaggaggtagaggtgggaggactgattgaggccaggagttggagaccagcctgggcaacacagtgagaaccctctctacaaaaaatacaaaaattagccaagtgaggtggtatatgcctgtagtcccagctactcaggaggttgaagtgggaggatctctcgagccaaggaggttgaggctgcagtgagctatgatcacaccactgtactccagcctgggcaacagagcaagaccctgtctctcaaaaagagagaaaaagaaagaaaacatttgagctccatagattgacattctgatttgaacagtttcccatagagggagaattgcggcgaaagaggcaaggcctgcccacaatgcatggtctgggacttagctgatgaagtgctctgcaccacccagcttcgaggagatggggactggggtttccccttgcttgacatcttaactacttcactgcaggaaaggggaggagggacaagaggaggaccaatccccaagggacacggagacccacattaggttttggaacccacgcctggtactatctgaatttaaaagccttgcttgactcaggcggggctgatcaaaggccatttgctgttttagagtgttcctatgtgtgcttggcagacagagttgtctttttattgcttccattcccactaagacctccatccccccactgcccccccaaccccttggtgagcttggtgagatgtgtttttttttctttttttaattttaagttccaggatacatgtgcaggatgtgcaggtttgttacaaggtaaatatgtgccatggtggtttgctgcacctatcaacccatcacctaggtattaagccctgcatgcattagctgtttatcatgatgctgtccctcctgatgagatggttttaagttggcaccagcacctgtttctcatgccttgcgtatgcagcaggaactgtgaactagggacaggttcatgccctttggccactgcagacgtggagctgtggacgccagtacttgtgtggagagtcggtgtctgttggctgtatctcagctttcttttcagggcagacctgatacaggtgttctaggtgggaaaagccttagcacttgttgtgaactattatattgttactctctggaagggaaggtggaaaggggaatctatgccagtgagcacaacacaggccgcatatggacacacatgaggtcgctcggcatgctcttaggcccagaggagacagaatcagatactagcctatcctctggctgctcccaggctagcagggaggtaggtgtctaaaccaggatgtgagctagaggggactatagccgtgcacaggaggggcacagaggacggagcaagcagggcaggcttcacggaggagggcttgtgagctgaatcttgagagagaggagatcctccaagttgagggaactgtgggagcagttagacagcttggattttggggggtgtagcacattgctccttatgggctggggtgtaatgtgcagaggagggcagagggaagattgatttgctcattatgcaacaaatgtctggagctccagtcctgaaccaggcccaaagctggggaatagcaactcagtccctgcccttgtggagtctgtggctggcaggggcatgttcattaaacaacttattgcatgattcactacttttctttttctttcttttttcttttttttgtgagacaagatcttgctctgtctcccaggctggagtgcagtggcacaatcaaagctcactgcagccttgaattcctgggctcaagcggttctcctgcgtcagcctcccaagtagctaggaccgcaggcacacatcactgtgcctggctagttttttaaattttttgtagaggtgggtatctcactttgttgcccaggctggttgaactcccgtgagctcaagtgatcctcttgccttggcctcccaaagtattgggactacaggcgtgagccacagtgcctggcctgattcatgattgaagtaccattaccataaatgctatacatccatgcattggatgttaaagggatcataacaaaaaaaaaaaaacagtgtcctttgggttttgggaaggcttcctggagaaataacgttgaggctgagcttgatgtagggagggaagtagcagggtgcatttcatgtgctgagggaagagagggtggctggaatgcagagagtgaggaggacagggggacaggcgaggtcacacttgcgttggcggggataaaaattcttatcttaggagggttggggaagccatccatttaaaagtttaagggatgggatgggaaatgatcaggtttgcgttttgaaaatatctctctgacagtctacacgaaaagtggcttgtgggtaccccagggggctgtgggggaatcagtgagtaagttgttgtggtgatccacttgaggaaggatggctgcttagctgagttcttggaggtagtgatggagaccagtggatggatttgagatgcatctgagaattggagcagcagcttggtggtttggttagttgaggagtagcaagtgttaaaggtgagaggcaaatttgacttctcattgatgtgagcagagcccccaacccccacctccgtgagattgagagtgttggcccatgcaggggacaggcagggcaggtgtgcctggctcagggggttgagtgtaaccccttggctggcaatcggcatactcttagtgacggacccctattggtaaacttgtttttgagcttgcactgtatacatatttatttataaatgacatacatatacttctgtactaaaatagcatgctcctaataaggcaaatcattaaaaataaaataggatgagaaaaaaagctaagcacacataaacattttaatctttttcttctaaaccctacttcggagaccactgcttttggccatggggagcacttaatgagttttagggtgggggtggccaggtcagatgggtgttggggaaagagcactctgcaatccaggggctctcccgtgagttctgcccaggccaggggcccaaggaggaggtgctcttgcagtcttgtcgtgtgtggcctggtgagtcagggacatgaaattgtggcataattgctatcccccgagaagtgatgttggcaatatcataccaggtgtgtgagggcttattggtgtttgatgtttgctagtctgtgtgtgctcaacctatgggaatatggcaaggcccactcccctgtggtccagcaggttcctgtctagagggctgaaggccatagttagccagggagagcctgatcttctaaagagagcatcacgtgagggatatagtgtcagttctcagcacctctactacctgcaacgccatcaccagccaattctgagctcatgtgggccactcttccccgtctctctggtggattgataatcatacttccctactgaactccaaagactgaaaatgatgcaaagtgaattgtttctatctttgcaatccaaacgttcctcttcgtttactctccagatcccttccagcaaattggtattgccactctccctccatccctgggttctcggggctaattctgttccagctcgctctgtttagctctttcttcgagcagaacccaagctaggatcttgccttccagagaatgctttaaaaagccttgtttcccaatatactgcgtttcagttttccacgagtgcagccatgctcgggagaggcgtacgagctgcttttacatgtgagaggtgaacaaatcaaaggtgagcccgttctgcctcagtgaggccttttgtgtaaaaagggccttctggagtaaagcaatcaggttgactgacaactgccgaggctaccagtgacagtcctgctccgtgggataacttggagaaaaatcagggccaaaagcagacaaaaggatgtccagaaactggaggtggggaagcctgagtgagatcaaacaacctgaaaatgtgtcttccatccatttagggctttatgtgcagcgaggttggagtggctggctgaggatgtcaacattttaaatttgtcactgctttgacttccctagctttatctcccttcagatcaaagcggggagactaggagttgtcactactggatttggtttcagactatgttggtgtacccttgctttatgaccttggggtttcctgtctttgcttggggtgacgggttcatttcaaacaagtgagatgtgtgttgtggtcttttattcagagtggggagctcttagaagcacccacagaggctttgaaaggactgggaagcagcttggagggccagttgcgtattttccaaggattcctgaatatcaggaatccagaagtttctatttgttagccttgctgctcctccaaggagccatcctgaaggcagtttagtcctgcactgggagacaaggcacaggcctgaagaattcctgccccctgctgtataataaatctgatactaaaattagtgctggcctcctgagccatatttcttgctgagatgataaagaagtgtgtgtgtggcaggctcatctttcaggattggaggatgttgctttatgtcagataagtgcccaggtctcgagatcatttttttatggcagcctctcccccatttccctgcttcctctccctgttctgttttgttaggggtaggagtaggtaggggtggataggggagaaatattttagcttgtcttctggttttgtgtaagtctctgtcaccgtaggtagatgttccttgagaatctttctgaaggttttataattgagtcttttacctccgtgacaagatattattcactttctctaaagcgtttactttatgcttgggctggggttggggggtggggggcagactttttttttttttcagggaactctgtctctagaagagacttgccgtcagggcagttgaatggccagcttacgactttaataattgaggcggcatctgggccccttgctgaacggcagtccttctggcagggcgattttgcttttaaaataaccatgttcacctttaactgcaaacggctgtgacgagagttgtatttaattttaaattgcccatgtccagtaaccctctgtacctctttaaataataaaatgtttttaatcttcctgcagctgtgttctctgtgtgggggcttgccatttttggaagaggagggggcttctgtgcctcctctccactccctttcttttccctttcaaactcaccgggacttctagaaaatgccatttcactaagggcggaatctggcccgtaaagtctctggagtgagtgctgggaagtttataagcagaggccgcacagggtcagtcagtaatgtcagcccctggggctgaagtgcttcctttgtgggcagaaccccagaagtccctttgtatcgctgacccattaaagactttttctccccattccccgcctccaacttcaggggggcttgatttgtctgttataatcggaaacagattttgggctcctgatccattatagatgtgtttgagatggatgccaaacctgaagccacttaaagagcatgtgaaaatgtgtttagatataaaggaaagaaaggaagagagaggatgaggaaagaaacagcctcttccaaatcccccaactagaaacaatactgaaatgataacacacaacaaaaaacaaacaaacaaaaaaactcgatttaggccctaggaaagcatgggaggagaaaattaggctccagagtcagccaagttggtgcttagtctgggatgaacagcccagtgaaggaggttaaaggaggcagaagaccacacgcgcacgcgcactcccggaagcgtggttcaggtggggcctgccgggtccaggggaatgtgtgtcccaggcttggagcagagggtggcaggtgcgtggggacgcatgggaagcactcacgttgtgcccagcaggtccatgtttctatcccggagacccttgggttaggaaatattgattgctctgtatttgtaaacaatctttaaggggatctagtgccaacacaaatagtcaacttcaggcgaatcaagtggcctcctctcaacagggaagcccattgctctgattttctggatcgacacagccccagatttattttcctttttaattctcaaaaggggcccgctgagttgagcattgcccaagtattggtttcttttcatccctgttgaattttttcccttctttaatgaaagagttggattggctgtgctgggccctccacccggtcatggtagtcctggtgacgcctggctgcagggtttcgaaggtggccctcatttcagctgtccttgaggctcactcctgtgttccccctgcccctgccatccaccccgcacccgccaccccgaaacgtttgtagtacagctgctggcctagaactcgaactgatgtgtctctcactccaaacaaaaaataaatctgtgtgctttatgtatgtgttttagaggtgtgcctgtgtgttttttctcttgacaagctcattccctacagctgtgcagtcacagcccactttgaaatctgcagcatatatatatttttaagtgaataagtacgaagagatgggaagatgtggtttgactgtaatcccacgtaaaacactctgaccccaatttttaaaaaagtatttcattaaaatgttgtaggagactattactgagaagaagaaagtttctaagttgatgggactcttgtgtctcctagtgtagagttgattttgttttttggggtcaccatggagatgagaagcatggggcttcatggcgtcatctgcccccattgggggagggcttgttggcacaggtcacctctggatcaacctcagcctcatctgctggggatgggagaagctcaagttggccaggggtttaccctatgccctcctcaaccagaattaaaatgaccttttttttttttttgccttcgaagacaacattggtaacaatttattgaaactatggagcttagcagtgatcagtttttggattttctctttcttcaacccctcccctttctggaagacttgtaggaggataggggaggtttttctgtgcatagattggcgtcggtttcttagaagtttcttcttttcaccttaaaaaaaattgtttgcatccttccccttagataaggaaccgtcaacatccttgttagagcccagtgcggaggggaccctgaggcacatactgttttcaaggttagatagcaacaaactttcagagtagccggagtttcaggggagggagggttctttgggttcaaggttacccatttttcccctgctaggaagaaagcctttttgttttcttttgccgacttcttccaatagcttagagcaaatagattagcaacccagcagaaaccaaaccaaggaacaaataaaggggaagtttgcagagggcccttggctgggggctggctgctgctgaggaggccaacttgcggttttccattttcacggtgaaccgcattgtctcagcgttcgctggtattcacaaaatcagaaagaaaggaaggtggtggtgggagggcgcacttttcaggagaggctggggtgtggggaaagtatgcccagctgcatgttattagcagccttcaaataaagtttgtggaaggttccggcccccacagtcatgcctgggaagcttctgtgttcttagtaggtgttttgaattctgtgggatggaactgaatgtttaaaaacagttacaggaacgtctccccaagtaggtattcctgagaatttctgtgtacatggaactctattttcttagcaagcatcattatatttttagaaatgttttcttttctccttgcccgtcagttagccaagcctcctaccactcactttctgttgtgtagttctgattttccgaacaggtgtttagatgatgaggggttatattaagaaagtactaaagaatacgtcttatcacgtgaatcagtatctttttattcaacatggatggagtgggagtggagaccaatctgttttatattcctgcaatctgatgagggtaagaaaaagttcatgctgttcatattagctagccagcctctttctgtctttccctcccttccttctttcttctttattttttctttctttcttttgtctaatacctaattccttatctcatttttgggattttgagagaataattttcatgtggggcgacagaactagtggttgtagtttcacttgtttttttgacattaaggaaacaacaaatagtctttttttttttttcctcagactgagcacacattttaagtgttttagggggaagctctgaaggcagtttgtggtgatttttaaaaaaatgtttttaaagctttagtctctcctggaagctttgtgtgtccctgcattttcctcgacggtcgctaataagaactgctggtctaaatcagtgtctctgagagtcattgattcactaattgctcatcatcgagtcctggcttccccctcctgctgagagcacttttgttttctgctattctgcaaggacttggacagatttctggagtgtttaagaggtaaccaataaaagagtttggcgtgcccctgttggtaattgtgcttctcggaggtgaccacgtcattggtatccgggctccataaacaaggggctgccttaccagtgacctttcccgcctaaaaccgaaggccccaaggtcgcttgtctgatggagaatgtatttcccggctcactgtgagcctcgacttaatttgttcctttcctaaggcaaaatgaccttccagtaaacccacaccccctcccccgcttattattatttatttatttttctggtgaacaaacagaattaggaaaggtgtgttcttccaggagagagcgggcagtgtgggaggagatggcagtctggctcattaaaatgccgaggtaggtttaagctgattgccaagtgcgggtcctgcaggtcagagtgtgatgcccagaaacaaagcaaggcctagggagaggctggcctggaggcaactggctcgcgccgcagagagttttgaagccacatttcttcattggaaatttaaaaagaaagaaaaaaagcagccccttttgctccatatttatcatctctatagtaccctacaaataagtggtctcaaaaagttgtttttttttttttttaatttgctgaacctttataataggaccctttctgagggccccgtgagcccaagaatgcctccttgcaatgtgagtgtgggaaattagtgcaggcccaaggaaaggaagtgtgaaactgcttccctcagtgaacacccagcctggcgaggctgtcctgtgtgtcttggaagccctgctgggcctgagtttgggtgccatataatttgctggcctagcaccccttccatgggtccctctcggccagcctcaaggaaggggtcctgtgggggacagaatagtgtgtgtgaggggctgtctgcgggtggaggactgccggggcttaccatcctaacttgttgctcagtcgcggagtcttgcatgttgactctcctgggcttggttggccgctgctgctttcctgtggttgttggtttgtgttaggtgtttggtcctctggtttgctttgggtactgggactttagcccagggaagaggcctgtggtgcttctctgcctttcggctcctacgtggggcattggaaagccctttccctgcctggttgaaaccttcgcaaactgcacacctggccggcctggcagtcaaatggattccatggcagcccctgcctagagcggagcaggatgtctgtttcggccggttatgaatgaaatcagagtcctgtgctggcaatgccattgtgcgtaaggagtgcaaggaatgcactgggccatcttcccagagagaccctatagacgaaacagatgtggtcagatgagcccctggagacagcagtagtggggagtgtgggagagcaggccagggcggcaccaggaggagcaggaggagctccaggaggattctgagcctcctcctcctcctttattcctccatccctctgtctggggtgggatgtttgggagaagagaggcaatgtggtatggtagataggcctgttctttggagacagttctgggattgaatcctggctatgtgacctggccaagtgacataacctctctgagcctgatgtgtgtcatctgtaaaatggggataataagacttgtgtggcagctctgggaacagacagaactttctgtagagcacgtagcacaattcctggcatctgttaggtgcttagtcagtgttgattatgcagccagcctggacccagctgttgtcgctgggacagggaggaggtcgtgcagttaccgaaccctacaccattgattttactgctttggaccgagaggcccgagtgtgctgtttagccttccaggccctgaaaggttagttgtacccttctgactttctctacagaatcttccccctaaccttcctggtgtttgctaaactgagagttagcctcacagagtcccagcttctcctgggtcatcatccttttctctggcctctgcctgagagcagcgtgcaccggagactgagggaggttggctgtaatcagcacagacccttggctctcagctgagggtggatcccagtgtctagatgatagatggtgcagtttggtttctaattcctgcttgatttagagaggtgctgggagtgagtggtgttacagggaacggaggctgtgggaaggctgggagtgtgagcgtttgattaccttctgtgctctaggccaggggtccacaactttggcactgttgacattttgagccagattattctttgttgcaagggtggaggttggggaagtgggggtgcattggagtgcattgtatctgtagtaggatgtttagcggcatccccggcctctacccactagatgccagtagcaatccctccctggttgtgacagctagcaattgccacgtgtctcctgggggacacagtcacccttagatgagagtcattggtctagcactataggtcacttctctataagaaggggaaatatttgtatgttttctgaggttctgttctgcatggattggaacctggacaatgaaatattcatgaaattcaagagcaggaaagtgcctggagagatcacctggtccaggccccagcctcccgcaggtggctagccacatgccctgggtttgatttccacggctcctgctggtcttcccttttggttaagtgaaagggcagggagaggggacgtttccacccaggccagcatctctatagagctttttggagtgggaacttcttttagcagaatgactctgcactcctgggctcttggcagtcctgtgtttgggcctctaggagtttggttgcaagctccacgagtttgatttgctctctcatccctggcacacacaaatttgtcactcagagggactggcttttctgcatgcactgaatggatttttatttgaaatgaattcattaaaaaaaaaaagttttgcttgccaggactctgccgtcctctcttcccttttatttctctctgtcgtctgtaagacgagcctggaaggagctgtctggtgggattggttggccagggatttttctaggccctgattaaaggtaaattatcagatgaaagttggaggttgctgctgtgcttgtaaaaaagtcacttgtgtgccataaaatccatcacagctcccttggtgagaaggaggaggccgtgaaacactcagtgatgctacttcggcttccagtgatttggcttccctctgctgcaggagtgctgcccggcagcccggtgcaccctgctcttgtgagaagctcgctgaatcacgttggtgggaagctcagagacagaactgtgtgttgccggcaagttgccatgaagtagttttagatgttggacttaggagaaccagatggctttatggagtagaagcggagcccatgatgtcttggtgacttttgcctctcttttgcttagaaccaaagaaggtggttgtccagttggagagggtgtggggagtctggccttggagaggcagtatagcccatggttgacagcatggatgcagggaccagactgcccagccagttatagaggtgggactgtgggctagttatttaatctctctgtgcttcagttttctcatctataacatggggatgagagtaatagtacctactctggggtcatcttgaggaatttgtgcaagaaaagggctgagcctatagcctggccaggggtaaggaagtcatccttaattatattatcattggttacactattctttttaatttattttagtttttctttttagagacagagtctccctctgttacctaggctggagtgcagtggtgtgatcataactcactgtaccctccaactgttggactcaagcagtcctcccacctcagcctcccaagtattggcactacaggcacatgccaccatgcccatttaatttttaaaaattttttgtagagatggggtcttgttatgttgcccaggtgggggtctctaactcctagccccgagtgatcctcctgccttggcctctccaaatgttgggattacaagtgtgaactactgtccctggcctggttatattattctataatagatggttagcctggctcctgaggctttaggaaagtgcttctcagactttactatgcagaaaaatcaggtgaacccattcctgggcatgctgaaatcggtgtctcagtcttggggcccaggactcagtgtttaatatctcaggtggtgatattgcagggagcccgcatataacctggtggctccttcaatggcagtgttggtcagattcttaaagaatgaagggcccccgtgtcatcacaaggagaagtgtcttccaccttggattatctgggaaacagttctgcccacgctggggggcctgatttgggccctgcgtcagtgtcctgggtgtaaacctctgcgagatgcccctgggtgtcaggtcctggctgcaccccatcgttaggactgggggcagcagcagatgagggaagacttgtctcctctggcccatggagtgtccctgtttttcagctcagccagcatcccatactcaattctgccggcgagagctgtgggcctgttttgcaggttgtgtcgtttcagcgggtaactggtatgtgtgtgcatgcgtgcaaaagaaaacatcaaaatgtttggggagtgttttaggaaaatagcaaggagcagattgccaagattcgcttatatgtttctttttctttccttttcgctgtgtacatgtgtgatcagcatcccggagtgttctgaaatacagctttggctttcttaccccaactattcttccgtatagcagagaggatacaattcaccaccaataataccgagcaataaataacccagagaagatgaatagccttgtgtggtggtaaattaaagttgatttattgcacataatatatacaggtgctcctaatgtaattaagcagcgaggcttttaatgttgcagaatctgaaagaagacccaagaaaattgggtcttaataaggcttattgaaataacagctaaacatgctgcttagtaccattaggggatgctgaaagatggatcgactctgctgctttttcttatgtgtggagatgacacacctgacctgttgtcagcaggtcccgcacttgaattgttttctctacggtaggactggattgttttgagctgtcaatataccctggccttgtcctgcttgtggccagaagtttaagtggctgcctattgaataggttttttttgagtgaaggacgggggagctggaactgaagaccccactgtctacagccataccaccctgaatgtgcccgatctcatctgaagaccccagcctcattctcccccgccattctaactaaccaggccaggcaggagaggatttgttcatggagtgaactcactgattgagcctttaccatgggcagagtgctgtgctggagattgggagtcagggatggaaacaaaagctagacagtccccctcctcaggagggctagtgggcgagacctgcgtgaaaatgcaggatcgtagaggaggggacgcattcaccgagaaggtccagtggattgggggctagggagaccctcggacagctgcctgggggaaggggctagagaatgggaggggaggctggactggtgatttaggggcaagagcaggaaaagttctgcattccgctcaagagatagagactttgcctgaaggcagtctggaatcctggcggcttaggagccagggcatcatcacattgatattttagagagaaaattcttggcagtgttataagtcatggactgggggagaccagggagctaagagaacagggcctggaccagagcagggggcagagtgagtatgaaaggaggaggggtgagaggcaaactctcccatgtgccttagacctggtgactccagtggggttggggtggcagggtacctggaggaagggtggatttgtgagcagccagtacttccatcagaacccctcgggggtgcttgttagaaatggaggttggtggggggtccctcacctgtggatctccagttgctaaggtgcctggacatctgtgactgaaaccaggtccccaaaggatgctgaggcctggaaaccttggtctcacctggagatgtggctccacgatgcccttgggagcgagcgagtcatttcacaaagtgttaggagggaaaggagcctttctggggccagcacggttggaagagttcacagcctttctgtgagttgctttaggggcctaagactttggttgctgaaggaagtataaatgtacagtgaccctccaagagcctccctctcacaggtatgccccactttaagaaaacccgctagacgaaaaccctgacttttggagtaagatttgtcaaggagagagagttcttcccagtaccaaaggtttcagaaaaagacccgtttaagtagtaagctgaccttctgaaccaataaataagacagtggtttctttcttttgtagaggtcacctgttgtaaatctgagaacatttgaagaatttactgcattggctcattaaggttaaaaaaaaaaaaagtcagtcgacttggtcagcattacccagtgcccatggttttcagagccacccctgggtgaactgagaatggtgtttgctccagagcctggggccacaggggaggctggggagagactcagggccctactgttggaatggccttcacatgacttgtcctgcttccggcttggagtatgaaaccaccaagaggtatgtacagctcgcattccagcatgggaggcggggaggctcctggacccacggggctgtcaggttgaggcctgctctgaacgcctgagcactgcgatcctgatgtggagagcttccttccacctccgcctcctcctcacgctgcaacagcgcttggctgtaccttgccattacttgattatttgcagaattagaaaaggctcaagtatctgatcataattttttcctggatatatagcacatcctctgaatatgtaatcagtgctttattgtttttttgtttttttttttgtttttttttgttttttttgagatggagttttgctcttgttgcccaggctggagtgcaatggcgcaatctcggctcactgcaacctccgcctcctgggttcaagcgattctcctgcctcagcttcccgagtagctggggttacaggcatgcgccaccacacccggctaattttgtatttttagtagagatggggtttctccatgttggtcaggctggtctcgaactcctgacctcaggtgatctgcccgcctcagcctcccaaaatgctggaattacaggcatgagccactgtgcccagcctgtttttttttttttttaaaggaatatgggctgttagatgttgtaaatggataggcaatgcatgttcactttttctgaggcttgttcagggaaactgaaaaaagttcctctgtcaccttgtgtgcatctctgtggtactgtctctccagggtagtgtgggatttagaggagaggggctggaggggaccctgcagatgtccctatgttctggaggcggacttgtttatttttgacagaatgaatcttggacatgggaggatctggctctgaccagccacaaattggatatttgtttgacctttttattccagtgagtgggaagagatccggtacctcctttatcataaatcttgccttgttgtttgctccagtatagcacttcatctgggtgctgtttgagcatctggctttcatttttaagtgccggcaggtgcaggggcaggcatatctcagggggccgtggcagatgaacgagatgtggcaaaagctggcgtggcactgttgggggtgagtttcacgggagaaaaaggagttgagcttattcttgggcaactctttgccttcctgctaatgtttccaagtataccatgcaagaatcaactccaaggggctagctgaagctggggaaggtgaagaagtgagtctgagttgtctagaacttgattggtaacatctcagggtactgccagctgctggaccaatgtggttctcctccttccctgcctctcaccccttcaagatgagttgtcttgtctctgacccatcctacaacagccacaagtcagtcgatcctgtgtttgtgctcccgaaggacttggcgacttggctaacaaggagacatttgttatttcatttcctcatccattattcatgcagtgagaggtaattagcatttagtaatgtggtttctggggtaggtgagttgggttcattcattgagcaaacatttcttgatcccctgctctgggttgggtgcaggccagggggctagggttacagagatgagggaagggcctagtttgcctttgagtgtgtgtctgtttggggaggcaggtgatcagcgggcgaaggatgctaaaggtgtttcaggaccaccgagcagagagtcgtttctggggagagccagggaaggcttcatagaggaagtggcatttggcttgggccttgaagagtgaacaggaaagaattgggatggggggaatgtgcccaccctccagtgcaaactgggtcctggggtttagcttctgatgatggatggtcatggtcatgtgtctttctgtgcagcgctgcccacttctttccccaagcctctgtcactcaggagaattaatacgcctcctgcccagcatctggtggccctgccgccctgcttgcttagggagatggctgacagttggcaaggaggggagctagaagggtgctggtgagtcatcaggctccccatggctaaaaagagagcatacttcaaagcccagagcatatcaaagatgggttgtgtcacacccactgagcattttacacaaataagaactcagtttctgactctgcagcaaaaagttggtcagtttttgggggattattattattattattttttatacaggtgcggtaggttgagaaatattattcatggaaataggctaagttgaaataggctctatctgttaaggaatagacttattaaggtggtgggtgtgccctgtgtctctcttctttaaactccgtttttctttgttctagccaatgttttattgctgatatgaatcactgaggggcttggagggagaaaggaaagggtttctgtataaacagctgtcttgctgattcaatctacaaagtggattttatagctaaagtatttgttcttgctttaaaatgccaaaacagcaccgtcatttcctcagcgaaaagaagggtctttgagaatatggggctttctgctcccgtcacaaatctttgcttgggggagaggaggaaggaattccatagaacttttctttgaactggtctttctaaaagaatctcatgctcagaggagaagaattttctttacaaagtttgagttaccagttcacgcagccttccttttttttttttttttttttttttttttttttttgccttactacatgttctggtttaaaaaacaataataatcctctctggtcatcacagctgactacctgcttaatgtttgcatatagatatttcattttctttttttatgcaagatttcatcgttgcattatctgagatagttggttgccctgagattattaataaattgagacagttaatggtgtgtgactcagaacatacatttaaaaacaagttggaatagaaataggtcttttacaaaattaattttttgttaggctcctctcttgagcctttttgtttgaagccggctggctttgtagtgttcatatatggccgactgcaattaacataaattacttttaaataccagttagttgctgtggagagaggccagggtggtggctgcttatggaaggttaagaggcttggtcattgtctgggtttttatctcactgtggatcaaattctgttccctttggaggccagaagatcgtgtcaaagattgctttctttgacgatagggagaaggattaagtctttgcccagagtaccagtacttaccaaggaagaataaataatcataaaatgtttacatatttaaaaacaaataatattaaaatgcaacatgtatcctggattggatccttgaacagaaaaaagacatcagtaaaaaaattgatgaaatccaaataaaacatgtagtttagttaatagtattgaatattgaatcagtgttaatttcttagtttgatcaatgcatcgtggttatgtaagagatgaacattaggaaaagctgaatgaggggtatggggaactctaagctatttttgcatttcttctgtcattcaaaaattattttgaaatattaaggcttttttgttttttgagatggagtctcactctgtcgcccaggctggagtgcagtggcgcgatctctgctcactgcaagctctgcctcctgggtttacgccattctcctgcctcagcctcctgggtagctgggactacaggcccgcgccaccacacctggctaatttttgtatttttagtagagatggggtttcaccatcttggccaggctggtcttgaactcctgaccttgtgatccacccgccttggcctcccaaagtgctaggattacaggtgtgagccaccaccatgctgggcccagtttttttttgttttttttttttttaagtatatttgtaatattgcttttggcttggttgagattatacaggcacaccttggagatattgcagattcagttccagaccattgcaataaagtgaatattgcagtaaagctagtcagatgattttttgtgtgtcttagtgcatataaatgttatgtttacactatactgtagtcaatattaagtgtgcaatacattatgcctaaaaaacaatgtgcatgcctcaattaaaaaatacatttgataaaaaaaaattgacaaaaatctgagcctttagcaagtcatagtctttttgctggtggagggtcttgcctcaatgttgatggctgctgactgatcagggtggtggttgcagaaggttggggtggttgtggcaatttctttaaaataagacaatgatgaagtttgctacattgattgactcttcctttcacgaaatatttctctgtagcatgcaatgctgtttgatagcattttacccacagtagaacttctttcaagattgcagtcagtcctctcaaaccctgcagctgctttttcacctacttttaggtaatattattaatcctttgttaccttcccaacaacgtgcacatcttcaccaggagtagattccgtctgaagaaattactttctttgctcatccataagaagcaactcctcatcattcaagttttatcatgagattgccgcaattcagtcacatcttaggctctgcttacagttcccttgctctttccaccacatctgcagttatttcctgcactgaaatcttgaacccctcaaaatcatgcatgagggttggaataaacttcttttaaacttctgttaatgctgatttttttttttttttactttctccataagtcacaaattttttaatggcatctagagtggtgaatgctttccagaagggcttcctttcactatgtccagatttatcagaggaatcactcactatccatgacaggcatagccttacaaaatatgtttcttaaattaattgaaattacccctgatccacggttgcagaatggatgttggttagaaggcatgaagacaacattaatcttcttgtatacctccatcagagctcttgggtgaccaggtatgttgtcagtgagctgtaatgttttgaaaggaatctttttttctcagcagtaggtctcaacagtgggcttaaaatattcagtaaaccatgctataaagagatgtgctgtcagccaggtgtggtggcttgcacctgtaatcccagcactttgcgaggccaaggtgggagtttgagaccagcctggccaacatggtgaaaccccactggtgtggtggcacatgcttgtaatcccagctactcgggaggctgaggcaggagaattgcctgagcctgggagttggaggctgcagtgagccgagattgcaccgttgcattctagcctgggtgacagagcaagactctgtctcaaaaaaaaagagatgtgctatcatccaggctttgttgttcaaatttatagagcacaggcagagtagatttagcataattcttaagggccctaggaatttcagagcggtaaatgaggattgccttcaacttaaagtcaccagttgtattagcccctaacaagacagtcagcctgtcctttaaagctttgaagccagccattggcttctcctctctagctatcaaagtcctagatgccattttcttccaataaaagacttttgtatacatgagaatatctgttgttgaatgtagccaccttcatcagtgatctcggctagatcttctggataacttgctgtgtagcttctacatcagcacttgctgtattactttgcacttttatgtcaaacaaatggcttctttccttaaatctcatgaaccaactttgctgcttccagtttttcttctgcacttctcagccctcatagaattgaagagagctagggtcttgccttgggttaggctttggcttaagggaatgttgtggctggtttgatcttctatccagataattaaaactttctccgtatcagcaataaggctgtcttgctttcttatcgttcatgtgttcactggagtagcacttttaatttccttcaagaacttttcctttgcattaacatcttggctgtatggtgtaagaggcctggctttcagcctgtctgggcttttgaaatgccttcctcactaagcttaagccttcctagcttttgatttaaagtgagagacacgtaactcctcctttcacgtgaacacatagaggccattgtagggttattaattgggctaatttcagtattgtgtctacaggcctgcgggaaggggaagggacgtgggggaatggccggtcagtggatcagttagaacacacacaatatttattgattaagtttgccatcttatttatttatttatcttaatcaatatttatcttaatatttattaagtttgccagtttgtggcaccccaaaacagttacatcaaagatcacagatcaccattacaaatattattataataataatgaaaaagtttgaaatattttgaaatgtgacacagaaacatgaagttagcacacgtggttggaaaaatgatgctgatagacttactcagctctacaattagtaaaaaatacaatattagcacagtgcaataaagcaaggcacaatgaaatgaggtgtgcctgcctttggtttatgggcattcatagtgatgacctctagggagggcagattatttccttgctgccttggggactgggaaactaaggccttcggggatgcagggagaccctggcttctggcttgtcgcttccttcactctgttcatctctgcccatctctacacagcaccgtggacccacgcacggctttactgcccacatacccttctgaaactggtatctagctgatctctcctaactccataggcactccttgcctgagatgggcagatggcctttggtgacgtgctgtcattctcctctaaggaccaagcagtgggatttttttttaatgctgtcttgtttactctcattccaggtgtcttaacttttagcagccagattggaagcttcctgagggtgggaatttttatcttgcttgctttcttttaaaatccatttaaaaaatgttcccaattacataaataatgcatgtgtttaataaataaatattagagaatttatagcatcaaaagtaaaggtttccgtagggctgcctccttgctaccaccactgttaatgaattagagtatatttctctatattttttctgcgtgtactacaaatatgatttacaaatgtgagatcctattaaacataccattttgtactttccactgggaatgcctcattgtcaaaggaaatgctgagtgccacctttaagatgatgtattcatgggtgtattagcccgttttcatgctgctgataaagacatacccgagactcggtaagttataaagaaaaagaggtttaatggactcacagttccacgtggctgggggagcatcacaatcatggtggaaggcgacagtcatgtcttacatggtggcagacaagagagaatgcaagtcaagcaaaaggggtttccccttataaaaccgtcagatcttgtgagacttattcactaccacaagaacagtacaggggaaactgcccctacgattcaattatcttccactggatccctcctacaacatgtgggaattatgagagctacaattcaagatgagatttgggtgaggacacagccaaaccatatcagtgaggcaggggacagagtgtatctctcacttgttaggtcctagaaagtctttgtaagctcctgtttcttctctgggagaggcggggctgtgaggagttcttagacacggagaccttccttatgtaacaaaacatcccagaagccttatcagtgttgttacaaccccagttagtgaagtggtgtggatacagggatttttctagaataaatcttgctttgtggtatggatggattgattcatttccctttgattttgtgtctccttgatagaagtttgacttgacacaagggaaaaaggtggtagtaagtactgagcacccttaagaagtaggtttctttagagcggatgcaaggtcccagaaggacagtgatggtgctgagaggagaggagtgcaacctgagtttagttgaattttccttcctcacatataaaatatcgcatacatacaaaaacatgtgagatctccgtgtaaataggaatactcacatagtcaccatccggcttagaaggagaatattaccaatacctttgatacccctgggtgtttcttcccggttttacctgcctgccttcctatcacatttgggtttgcctgcttttcacccttgtattagaatacttttttccattcatgtggtgtttgtggcattcattcatgttgatgcaggcaactgcagctcatttgttttcattgctgtagcgtgttcattgaatgaatgggccaccccttgtcttttcttcttttaagggacatttgagttgccgagtttaatttttggctagctcaaaccgtgctgcagcgaatattcttggttttttttttttcaccgtgaatattcttgtatatatcttctggtgtttatacatgagtttaccagaatgtgtatctaggagtggaattgctgagtcttagggtatctacaacttcaggttaactagaaactgcattgcaaagatccccttctttctgcacttgcaccttttgtgatatattgtagttttcattgctctgcatccttatagacagttgttattttcagacttaaaacattttttccaatcttgtggaatctcgttgtggttttatctagcatttccctaatcactaacaagattgaacttcatgcttattattgatggactaactgattggtgcatgatacttttacatacttttggggtacatacgatattttgatatgtgtatacagtctgtaatgatcaaatcagggtcatcgagacatctgtcacctcaaacatttttctttgtgttgaggacatttcatttcttccagcgattttgaaatacctttatttatttgtttttgagacagggtcttgctgtgttgcccgggctggactcgaattcctgggctcagtagggcctcccactttagccttctgagtagctgggataacaggtgtgtgccacggtgtgcccggcctagttattttgaaatgcacaataaattagtgttaactatagtcacttgactattctgtcgaacactaagacctgttccttcttcccaagtgtatttttgttcttgcttattttttagggaaaggaatccaggcacacttaaacacacttattaaatgacacaaatggctgctttggtaggacatgttctccccagtgctgttttcttgtctggggatggaatcagacaaatcttttcacttactgtgagaattttgggagtgtctattagcttgcagcacttttcttggattctgtgtattacattttgagaacccagctgatgcctggttctgttgaaacccctaaatccacatcctcttttgaggggagcattttattacttttcatgtaaataggcaaataaatgggacttcaggcagagtccctgggtgtttggtggcagcagatcgtgggcaagggagtggctttggggaggagttgggggacagccccaggcaaacatcaacacctaagatagaaaccccaaggtagaaactggccgagtgaggaggagagagggagaaacagcaacacacttttcatagggagggatgagggaaaaaggaccaccaggctccagctggtgatcagaggccagagcggggttgggcaggactgctggagcacaggattccctgtccggtgttcacggggaagtccccaaatctcaatgagggacccattggccagggagggttctgctgtggctgtagctttggcgggggcggtctgttttactacatgttcagctgagtgctttcctgtgaaaatagacctttgatgttctggaaaatctgctttaacacttgggggagagaagctgcctatggaaggggaaaaaaaagttatgttacgaaagaatggaattgcacagctcgacatatgctgggttggttgttctagtaaccccatgagaagaattgcaggaccaaacacaggctttcattcccaagtgagaaagcatgtttagaaacgcagtgtgaagggggaaaaatatcagaggctaacattgtgtttctgttgtgaatacaactatataaatattacctgtgcttatggacaaggtccaggaggaacagggaaaaataatagttgatttcatttgtgtggtgggatagtgggtgttttaaaaattattgtattattattattgtacaggaaaaaatctttactcaaataatcctggcctcagcggtctgttattttgctacatcactcggaatacctgtcaacacatttatttattgagttcctaatatgatgggccctttgaggaagaagacactagtccctgcctccaagaaacttacaaactattatgggatgctagactgtaaatacccaggatgtgaatgatagttcagtagcgtaatgggccgtcacacaaggtgtcgtgtggttaattgtcaaaggaagtagaaaacagtacaggctcttcctggggtctttcaggaggatttctcagaagaggtggccttgagagagtccctcaagcatgggaggacctgaattactagagggaggagggaagggagtcttggagggaaggagcagggagggagagctttatccaaaggggaacacccagaaaaatagttgggagccatattaagagcccattgatggctgtgcgccatggctcacgcctgtaatcccagcactttgggaggccgaggcgggtggatcatgaggtcaggagattgagaccatcctggccaacatggtgaaatgctatctctactaaaaatacaaaaaatagctgggcgtggtggcgtgcgcctgtagtcccagttacttgggaggttgaggcaggagaatcgcttgaacccaggaggtggaggttgcggtgagccgagattgcaccactgcacttcagcctgggcgacagagtgagactctgtctccaaaaaaaaaaaaaaagaaaaaagaaaaaaagaaacccattgactatcaggataaagagtaattttttttttttttttccttttgagaccgagtctcactctatctcccaggctggagtgcagtcgtgtgctctcggctcactgcagcctccacctccccggttcaagcgattctcctgcctctgcctcccgagtagctgggactataggcgcctaccagcacgcccagctaatttttgtattttgaatagagacagggtttcactatgttgggccaggctgatctcgaactcctgacctcaggtgatccttctgcctcggcctcccaaattgctgggattacaggtgtgagccatcgcacccagccaggagaagctattaagagtttacccagaattcctccctgagattcactatttgtcagtagtcttaagctatttttgggtaggtcctctttcagcatagggtgaaacctctggaccctctcctaagaaaaatccccttagaactacaagaggtctcccacagaggggttttcttaaggaagactccccacagcccatccttggcagtgtagcaaatatgtatccagcatctactgagtgccagatgttttgtgggacggggggatacagtaaaaataagacaagccaggtcttcgctctcagagagcttatagtctaaatggaaggacagatgctgaagacgtgattacaggcaggagagtgttattaggaggtagaccagatgcttgggaagagtgataggtggccccagcctttaggaaaggccccctcagttgggattcagaatgaggatatttaggggtacagaatcccacggtgtgagttgcagaagggcccgagcatctgtctggtggcaccttctcaggaggaacctcactgaccggcatgggtgaaccgttcagctagggtcttggggaaagtcaggcatctctggagcctccgatgttgaggatagggtaagagcagcattgttctctggggccctttttccttagtaacacacactcacccggagccagttgtgccttcttgcaaacaaacagctttcaagaagagttaataaattaatcttctgggaaaaagaatctgctctgcgccagcaagacctctagcagccagggccagagacttgggcaatgtagtcaaaacacacgctgatcactgtgtgttactgctgacgaggttttaggcagccagttcggtgcgtttgatatcgggcagttcaggcagggtgaaggaagataaagtgtgttaaatggagctctcacaacaaccctggaggatctagtcccattttacagatgaggagcctgacacacagaataaaatcgacttaaggtcagctacgagtccctggaggctagggttgcgtattctgttccttctctgccattgagttggctttccctttatccttttcttccgcttaataataataggtaacatgacccacaaggtactgtgaaaagctctatgtaaaccatcacttcttactagaaaagcatttcaaaccatctgctcaatctatatttaaagagggtgtaatgcccatactttattaaggtctaactgtattaaggtctggatatactgattcattcaacacatatttattgaatgtctgttatgtgcccctaggacatgtcagtgaataaaactgacaaggatcctggacctggtggggctttccttctgcttggccatacagagtagagagaagcctggcctttgcttgctctgggggttggggaagcaactgggagcctctggggacgctgaatcaggtcccactggctcctctggctgatgaggaagagcttctctggctgcctcttgtgtttccttctccttgtgccttaccacctgcagaccttctggggcttggagttcactgccgcctatagagaagatcccttccttcctactaatgagagagagagaaagagcttcccactgagatctgcttgttaaaaagttagactcatctgcaatttcaccaaacagatgaccttacagtgattaagtcacaaaacgaagtcctgtccgcccctttatgttggcttcctttgtagacacgtcctccccacattatcttccctctccccagtgtagattctggagttcccatcagggttctgcaacttgctcaaatgaggatgaggttggaagattcaagggtgtgacactgtcatttgtcctaaatggaggggcaggaaagagatcctgtcacccctcctgttcccaggaactgggggtgtacctggtgacagttagatgtgtatacatgtcatcgctgttcacatgctctgctgccaattttattttgttttatctatttatctatctatttgtttgtttgtttatttatttatttatttttgagttggagtttcgctcttgtcgcccaggctggagtgcaatggcatgaatcttggctcactgtgatctgctgccaattttaatattccttagtatacacaatgtgtctgccctcatgaaaatgtggtgtgaggatacccatatcatattcaaaagcaaagtgatgggctaagtaattatttggtgttcagaaagattcactggagctcctttaactagggggtccccagtttgtttacatgaggacttggtctttgatacatttgtgcagtttttgaggaacattttgagcttcggatgcctgcttattccttgggctgtccaacatttcctaaatccttaggagtttttcctctatttcctaacactctgtgcaaccccctgtgattaatttcatatgtccacttggttaggcctatggtgcccaattgtttggtgaaaccttagtctatgtattgctgtgaaagtatttgtggatgtgattaacatttctaatcagttgactttaagtaaagcaggttactctccatgggcaggagtcacccagtctgttgaaggccttaagaacaaaggccaaggttttcccaggaagaagcaattctgcttctggactgcaacatggaaaccctccctgaatttccagactgttggcctgccctaggattttttttttttctctttgagatggagtctctctctgttgcccagagtggagtgcagtggtgcaatctcagccctccgcaacctccacctcctgggttcaagcgattctcttgcctcagtttcctgagtagctgggattacaggcacctgccaccacacccagctaattttgtactttttagtagagacagggttgcaccacattggccaggttggtctcgaactcctgacctcaggtgatctacttgccttggcctcccatccactggccttggcctccttgggattataggcatgagccaccgtgcctggcctgccctaggattttcaggcttgccaaccctccacaatcaaaagccaattccttaagataaatttctctccctctttctctctctctcctgttgattcgatgtctctggagagtcctgactaatacattccctatcatagcagttgcttgtttctctttttctctctcttggaccataacctgtatgagaactggaacagtgtcttgttctctgctccattccaagtgccttccatagagcctgacagacagacgatgctcagtcaatgcatgaagaatgaatgaaggcatctgtactcactgagaggcagtggatttttgaccctttgtggtcagacagacctgagttggagtcctggccccaccattgattagctgttggatcacaagttccttatttgtcacagaggaggagtaatatctgcctcccaattggctgtaaggattaaatgagacgacgtgcctggcatgtagtaagtcatgcgaggtaaatcaaataatgttagctactcctgataccaccaccgccaccattttccaaggttgttttgaggattaaaggagataatggatagaacattcctagcacataataggggatcataagtgctagttctcttctaaatatcaagctttttcatgtgtatgtttttgctaagtgtataatatctatttaaatcccatgaagcagttttaattgccccatgttaatgctgagaaacgaaagcatagaacttaagtggcttacccgacattcagtaagcagaatgttttattgtgtgccgacttaacggttgggatttcctctttggcatatgatgtttgaccctgcttttcccctgaccttgtcatttcattaccatcagcttttgcttggtatggacaggtgtatacttccctaccacaggtgagcccttggttccttagcaggctctcctttacctccttggtgtggtcccagggacccagcctgctctctcttcctctggcactgccactccatccctgagagtcttctcagagactggctcttgagaaggtacaacccccctcatttccacttccacgttgtccttgaggaggagctgtttttcctggtgagttttattgttcatcattgaaggcagaagtttcagtgatgccacaggcgagggtacagttgggctattttcttttgtccgtggtaccatggaggaaactgagttcagttactcgtgcaaggccacagagctgtcacctggcaggcttcccaggttgagggctgcctgtattttcatcagcatgaggggatatcacctcctcagctattagctcatgtgatcctacaggctacaactgagtcttctttgtagtctcaacgcaggttttctgtggactggagaaagcctttggaaagaaatgttaatactctttaataagtgaaaatgcactgtagaagaatctttgaacataagtagttctatagatcatctattctactgggcttaatcatcataggggatttttgcctcaagtttggggctaaggaacttgtaagcatttctgtcttacccatgagctggaagctgtgttcagagcaagcttctcttatacttggatcatgcccctggtgccagctttattctgaaattgctttgggctttctgacagctcatattccccctctgccaccagttagcttccaggatgggcttgcagaataagtggctttaatcgtctgttggccacttgttatatatccctaccatggggaaacgtgtgtaataaaacatgaatatattggggcgggaggactttgtatgtgttaaacatattgtgtaggtgtataatggtgaaagaaaagtgcatgcaataaatattgggaaatgtttgcacaaatgagcaaggatttagtctttgtgacttgatcatccttgaggggaattccttctcaggaaagcaggtgttagtgccagatggtcacgtgtcagtttcctgagatcctgctcaggaaggagtcgttggggaagaggaggcagagagggccctacttggggagtctcaatggatgacacagccagaagagaggagagagggaggcacgactcagtggcagaagggttctcgaggcccgagtggagtgctattagtaatcaatagattcagaagcagcctgggcctgccacgagaagctggcagtgttggtctctgtccgctgggcctcagcttctctcctggcagacggtgatgatgggggtgcaggggctggggagtatgaagggtttgggctttgatgagtcagtgaatttagcatttgtgtgtcagttcagacccggctggcctggaagtccaggtggcagagggcaagtcaagccctttctggtactgtattctccctctttccggcccagcaggcctgcctggacctgtgttctgcttctgtatcctggactgagaatcactgtgctgcctcctgaggagctgctgctggagtggaccttggggcagctagcacattgcctgtcttcctaaaggcatcggtgcacagggcacctgggaatgacagcgggcctgagagcagagctcagtggagatgctggacccctgaaggttgtgttattttttttttttttccgagttggaatctcactccgtcacccaggctggagtgcagtggcgtgatcttggctcactgcgacctctgcctctcaggttcaagtgattctcctgcctcagcctcccaagtagctgggactacaggcacacaacaccgctcccagctaatttttgtatttttagtagagacggggttttaccatgttggccaggctggtctcgaactcctgacttcaagtgatccacccgcctcggcctcccaaagtgctgggcatcagccactgtgcttggccgactgtgtcattttgtacttgcagcacaggaaggaacttgtcttttcctcgtgaagggttagaggcactttggttcttcattgggcctcagtttacctaccagtgccacggggatattaatgagtgcctcacttgactctttctcccacatggatgctgtgcagatagaggttggtcctagagaggcccgagagccttcacagatggtgtggcagcaccgcagagcgccttggcatcagatagacccaccttcaaatccttttctgccccttactatctggggacccttggcatattgcctgttctttctcggcctcagttttcttgtcaatttaaaaggaataacaccattttttgaacggaatggttatactcatttgacaacgttgttgtgaggatctgatgggtttctctgcaacatgtgtcaaattcctgtagtgcccaggacacagtagatgctcaatatgtggtggctctgattactattattggtgttgtttgtagaaaattgggctttcgggtccatcccactggtggcttgtgcctgggagtttttggcactcagagaaactgtgggagacctttagctgttgagaccagtcatggatgtgtgtgacacatagggtctatggtgacttctcagcagatgataaagtggtgctgggtctttcttggacagctcaaggatggaggtgcttctttgccagaagcagggttccctggattctgaaatctcattttgcaaaggattaaagataaaagagagaaaccacagcagttctacatgcggtaaaacactccccactgttcaaggaagttcctggagaggtacctgaaagaaaccctatatgctgggagttggtgctgttaacctttggctcaggggaagtgggaaagctgaaaggacagaatgaaagccatagtattggctatatatatatttttaaacaggccctgttctcttgcccaggctggagtgcagtatatacacattgctcattgcagcctcctattcttgggcttaagtgatccttcccaccttagctgcccaagtagctgagactacaggcatgggctggctgctatgcccggtaatttttaaaatttttttgcagaaatggggtcttgctatattgcccaggctggtctcaaactcctggcctcaagcgatactcccaccttagcctcccaagtagctgggactaatgcaaccacacctgattaattttgtttgttttgtagagactgtggggatggggagtggttctcattattttgcccaggctagtctggaactcctgggatcaagtgatcctctcaccttggactcccaaagcgctggaattacgggcgtgagctatggcatccggccaggtattgccttttgatacctgctttctctggagacaagtcatagcactcaagcctggaagggtgatcactgtgttcaggtcggagacagagcacagtcccagcagccgagccatcaaccaggatattgcagggagaggcccttggccttgctgtcagagagttatggagagtgcaatgtcaagagaactacattattgtatagtttcttttcgagagaactacattattgtatagtttcttgatgcctgaaggcaactttgcaggaaggaaaggccttaaatcttaagactgtgttgggttgtgtagcaattcctgcctaccttctatacttccttcctaatttttctttttcaaaactgccaactggaggaaacctggtgtggtggtgtttgagaggctccgggtgggtgctgacctctggcttcaaggctgcaggctccctggggcccgggttgggatgcctcccctggggaggtgcctgatgagagagaaagcaccctgctgcagtttcaaggctgaccagccttgtaaccttcaaaagagcaaaccctgcagtcttccagagtgtaaattgaagagaaagtgaccctttcatatttcaggtcctgtgtgagaaggaaaagaaaattctctgaagatgcctgggctgtgtttttttacaggcttggaagccaccataacttttaacttgactccctcctctctgctctttgcttgtgaaggattttaggattttgtatgtgtatgaattaatgggcctgttttggatctttcttccttagaacacagatgtccagggcaccattatagttccaaggggggttaagatttcccctttgcaaaggtcgacattggatttcttttttgggacagagtctcgctctgttgccaggctggagtgcagtggtgctatcttggctcactgcagcctcagcctcctgggttcaagcgattctcctgcctcagcctcccgagtagctggaactacaggcgtgtgccaccatgcccggctaatttttgtatttttagtagagacggggtttcaccttgttgaccaggatggtcttgatctctggacctcgtgatccaccagcctcagcctcccaaagtgctgggattacagtcgtgagccactgcacccggccggcattcgttttctgatgtctcatacagactttctctgcttgccttagggctgcagctaagtttaaacccagtgggtttgtgcaaatgtctgtccctgtagtatgcattcagaatgtgttggtctgactctgtttggtctccttttctagcataaaacacgtccacactcggaagatggtaaagcaacagtccaaatctgctttcactccctgcccagcatttagtcaccgctgccttttgacaaaagaattactttcccttcctggttttgaattgaagaccttttgtgtatttactgcaaatatgataaatgctagtctgtagaaaccagctgcctctgagggctgggggcagcatttctaacacctggcagtttgcatttcaatatggtggcttaaagaaaactcacacacaccagaaaaacaaaacccagctcaaaacaatgattattcttggctgcctagtgggaaacaagagtaggggaggctcagtgggccctggcacaggcaggggaacttgctgagaagttactgcttgcaaggtgaggtccgctttcagttcggtccggttcatgtttatcaacgccttctgtgtgtaccgtataaggtgctaggcacagagacaggtgagacagggctctaccttgagctcacaagctgttggttgtcagataagcaggtcagggaacctggaggctccaaggatgaccaaagaggcgggcctgctggggtgggtccgggcagtgtcccagaggaggctgtacctaggattgggtcttgaaaactgatgtatttgtttgctagggccagtgtaacaaagtaccacggactaggcggcttctacaacagaatttttttgcttcacggttctggaggctgggaaattcaagatggaagttttgatagggttggctcgttctgagggctgggagggaaggatcattgcaggtctccctccgtggcttctagatggctgttttctcccagtgcccatatgccatccctttgtatgagtgcacatgtataaattgtgcccagatttcctcaaggacactggtcctattggattagggcccaccctaatgatcctattttaatttaattacctctgtcaagaccgtatctctaaatacagtcatattttgaagtaccagggcttaggacttcaacatgattttttcaggggacacagtttggcccataacagatggtaggagtttttcaaggagatggagtaattgtggaaaggggtttcccgccaaagggaaaggtaggggtacagccaccgggcaaagtagagcatcatgcattggggagcctcatgtattgtggggtgtaagagtgggcagtggcaagagatggaaaagggaaaatatagggtgagatcatatgtgaccacctgttcagtcaggcacctggattttttttttttttttttttttttttgagatggagccttgctctgttgccaggctggagtgcagtggcgcgatctcggctcactgcaacctcccactccctggttcaagtgattctcctgcctcagcctcccgaatagctgggattacaggcacgtgccaccacacccagctaatttttgtatttttagtaaaaacggggtttcgctatgttggccaggatggtctcgatctcctgactttgtgatctgcccgcctcggtctcccaaagtgctgggattacaggtgtgaactcctgcgcccggccgcgcctgcgtttttagaagatgccccaagtaaatcatgtgcacagtgaagtttgagaaacatgagtccagagctgtggttctcagccttggctgcaggttagaatcatcaagcggagggatgctggtctctgaaactctgatttacttggttgggggtgtggattgggctttaggagcttttgaaagctcaccaggtaatttttctgtgcagccaggattcagaactgctgtttgggcagtggggagccaggaagagtttaaagcaggggtgcgatgtggggtggaaagtatagaaactgttttctgccctctcttgaccaagagcaggagctcatggtctttggagccaaaagcagccctgccggataccaatgtcttgtcctggtgtcctttgcctggggcaggtcaggcgagtaaaggagaaacacaggcccagctgatttgcctgtcattgggggtgagggctctgatttgagtgtgtcctgtcgactcaaggaccacagacgtggggcatttgactccattgctggcagcgtttcttgggggcttgggggtcggtggaggggagcctgtgttgggggaggcagggcagatatgcgggtggaagaggggagttcccagccaggttttctggaaatggtacattcttatttcccatagtaccaaaggttcttgaaggctgggcccactcctcagaaaggatgctttttgtggctgttgcatgcaccagataagctctccaaagcccactggtggtaaaggtgatctagagcaaacaaacatcagtgaaaaagcaaacaaacccgaacacccaaacagcatttatcccagtttagcggcgagacttggattaggcaggtcacatggcccacaactttccttcaatccttgggagacttcttccgtggaaacctttttcggcagctttgcaattctgattttcagttaattagatttgtgctgtttgggagacttggttaatgcatttcaccccacagagctaatttgcctctgtctaaattaggtccttgctgtggcggagggtgtacacgggctgtgtgaatacagactcacgtggggtattgagagaccattagacagtaaacaggagagggctttgaaatcacatttgtcatcatcatcattattatggaatatctgaggtcccaccgagagaatagaggtgttcttcagagaaaggccatcatgtgagtacacctggtcttgttacatgtctcttgaaatacaaccaggtgccctcttgtactgttaacccagggccatagcatgaaggagaagggaaatctatctggagggtacaaagtagtagatactgctaagtaatacatttacaatctctaaatttttagggctgagagggaccttaggagctatcttagccagtccctcactttataagcccaggaatctgaggcctagggttattgctactttttttttttttttttgaggcaaggtcatctgtgatctctgtcatccaggctggagtacagtggcatgatcatggctcactgtacccttgacctcccgggttcaagcaatcctgcttcagcctcccaagtagctgggaccacaggtgcatgccatcacaccaggctaattttttaatatttttgtgtagacaggatcttgctatgttgtccaggctggtcgcaaactcctggcctcaagtgatcctcctgcctcagcctcctgaagtgctgggattacaggcgtgagccgctgctcccagtccattcctacttttgagtttggaaaatcctgtgcttttctttcctttcccatgtgtacttgcccccttccccatggtctttggaggcatgtgagggatggagggaggttaatctaatcgcatggatatatttgggaggtgactatgggaactgagtgaaggcttgaggtccggttttgtggattcatcacaaatgctatcctttgttccctttctcctgtgtcagaaattacagactctgttggtgatgggacactagaaattataatttaataatttgcatgctgatgatcttctcaaaagactttgaggcaggaaaaaaaaaaaggcagggggcacctagggagatagaatcaggaatcaggctctttgtttccattgcccacaagagtgctcaaaagccatttgtggaggtgggctgtgttttcagaggccctgtcaatagttaagatctgtacatgtcagaggccatgcatgccacctagactagggggcctttcacctctttgccatctctgataggttggaagaagcttgactgctggagtactgatcagtgggtgggcatatgcactcgattagccacgcctgccatggccagggcatgggggtggcagcatgcttactgtctgttgccatctcttcagcttataccaccaactgagatgatgacgatgcctggagactcttatttcaggcattttgaaaaaaggagacataacttctgtccctgggaaaattttaaccccatcagaaaggcagaatatatgcacaaggaggccttaatgcctaaagaatctcaacaatctcaattagcattagcattattagcataatttagtaataaccacccattacactctatcccatgttatagttttgcttttttttttttttttttttttgagacggggtctcactttgtctcccaggctggaatgcagtagcatgatcttggctcactgtagcctacacctcctgggctccagtgatcctcctgcctcagccccccatgtagctgggactccatgttatagttttgacacacggaatagataggacagaaatgaatatataaggcagagaaagaagtcaggacactgagatagggacttatttcctgaggttacacagccagcaaacgcagagcccaggataatgtgtatttggggtagtggtgccccagcctcagaatgtgcctcttgggaagggtgctccagggagtggttgaaagcagaatgtgggccaggcacagtgactcacgcctgtaatcccggcactttgggaggccgaggagggaggatcacttgaggccaggagtttgagaccagcctggccaacatggtgaaaccccatctctactaaaaatacaaaaattagctgggagtggtagcacacacttgtaatcccagctactcgggaggccgaggcaggagaatcgcttaaacccaggaggcggaggttacagtgagctgagattgcaccactgcactccaacctgggtgacagagggagactctgtctcaaaaataaaataaaatggaaggtggaaggtgagaaggtgagaaggtgggaaggtgggaaggtgggaaggtgggcaggtgtgagcatgtcctggaagaggaggaccatagaggtgaggtgggagacccggggaggtttttcactgttgatggactctgtgctctgagtgctctttcatcggagcctttcccccattccggattcttcactggttgtctgtgtctctctcatgggaccgtgtcctgaatgtcagtctgaagactctttcctcacttctgaggctacccctgggctctggctttgggggagtgctccagttttcattttcttcgcctgtttagagagtgtggccaccatatcacagaggactgggaatgggccggagaaattgtgggctgtgtcagggttggggcgttggtgctgctcataagaagcttgaaggcagagggtgctgggaccttctgtgtgaaacccgggtctgaaaaggtgcctgttgtggggggtgggggcggagggtcccggggagaaaaggtagctgacatagaagcacatacagcacgttcctgaatccaggccttggagtccgaggagtgcctttgtggcaagtttccccctttttaattttcttgtgtcgtttctcctgttaagtgcaaagaagatgcctcgctgcaggaacatctgtgctccttaggattccgtggctgatttgttacatataaatttcctaatgtaggttatggagctgttgagggagagaagcagggaagcaggctagggaaacatccttctccactcaacttaatattggtgcctgtggctccagggccagcccaggccccctgcctttaggtgtgtgggccctgaaaggacaacttttgtgcccactggaaagtgtgtgtggggagctgtggccgtagtcttgctctcttctgagctggtgatggggagcagccggtgattatgcagagcagggccttctgactctgggcgggctgagacaattgcttagatggttgtaaaggaggtgttcagaaatagtgcgacaggggcgaagcctgtgctgtcactggtgactggggatgcttgttagcattttctagggctgaactggttatcatttctatctcttcatgccaaggaagctgagattcagagaagcgaggtgaccttctcaagatcacacatgtgtttcggtggcatggccaggacgggaacatgaatgtccagattccccctggaaacaccatatttcctcaattcagaatgcacttttgttcacatttgcacttgaaaatccagtgcatcttacaaatggatggcatcatgtcagaatgatgcatcttatgatccacctgtgttagattcaatcaaatatggtagagacttttgatcgagagctgctttatggctggtattgggctttgaacacattttctcaattaatcctgaacaaaacaaaaccctcttgagtaggggtttgtttttgacagggtctcactctgttgcccaggctggagtgcagagacacgatcatggctcactgtagcctcgacttctggggcttgagcgatcctctcacctcagcctccctagtagctgggaccataggcacatgccatcatgcctggcgaatttttgtatttttttgtagggatagggtcttcccatgtcatccaggctggtctcgaactcctaggctcaagcaatctgcccaccacagcctcccaaagtgctggggttataggcacgagctactgtgcccagccgagtaggggttttctgctcagtggtaaagtggagcgagaggggcgactgcagctctcagatcccttattgttcctcaaatgagtgagctgtgagtcccccacccctcctacttggcccttccctttgcatcgtctcactctcagcttctctggaatgacagtgctttcttcctttgagtgggcaccaggctgctgccttgagttttctggacacttgctgctgaactgtgttccgatcgaaagaaatacaattactctctgagatttgaggggcgattgtgagctcttgcagtcaccttcttgttcaatacttgcttggagtgtctctcttgagaggactggaaatgcatctttgggtggaggttgatctgtatgaggactggctctatcacagggacagggatggtctgctttttgcctctcttggggagggaggagagttatttttatttaggtgtgaatgcgggggcttgaatccagggcagaggtgatgtctcacttctttcaggtgcaagccagtttgtaggaagataatagggaggattgttaggtatgctggggctgttttggagaatcctcaagggagaagccacgaagaggaggcactgtcagatgttcctcactagtttgcagagtgcttggaggtaatattttaagacagttgggaagggtcagaggtttctacccttagagtctcatcaaagcgctgagtgatgcccaaaggggatgaataattcttccagaattcggagtcctaagctttcctcttgctttcttgttgaaataggcaggctggttgagggatgcccctggccccgtcttagggtacatacagaaagaaatactaagcggactcttgctgtctttgcaaccaagcaaaggggtcctgcagagggtgtgtcaggaagggagaaagaagagacatgggtacaaagggctctggcagctgtctcagccatatatgtggtcatttcctagagatgagagtggacgtcttgtcctcctgcagcctgctccctgccatgctgccttccctgcatctgggcccctttatccctccttgttcccctcctacctttcatccagccctctagattctgtaccactcacctggagctaggtgagaaggatttaaggatatccactggctgtcttactctgggctataattggcggtgggggggatggatttgggggcctgggatggtctagcttcttcccatggactctgagtacccctaaaccctccaaacgtggctcagccagacaggctgggaaaagtgaccaggagtctcttattccagcttctgagactgctgtgttcttggtgagtctcccgcccgcggcttccaggcccaatctctccgttgttactgtgcaccaccaagcagagagggatggtaattatagatgctttaggagccgccatttgcttcacatggcaaggtgactcagaacattagatcagaattagagaaggagaaaaaagtgatcaaagaaagcccccctcccacgccaacctcccgtgatatcctagcactctagccttccgtcccaaataatagttatggaaatgcctcggcttctctggaaacaggaggacaagggaactctgttgcaccagaatccatgctgagctttctcttggactaggccagaagagctccctgcagccgatttgtcttctagcttgtgcctgctcacctgaggagccattgaatttgggctaaagaggtgcctggggacaagggtgagctggaaagggagatttggtcaaattaggaagggccctgctgttggatgttcttattttttcagtcttgggaaacagcctccaaagaaatccttttgtgttgggctgggcaactttgccatggatttaaacaaatttttttttttttgagactgggtctcattctgtcactcaggctggagtgccgtggcgcgatcttggctcaccgcaacctctgcctcccggattcaagtgattctcatgccccagcctcccgagtagctgggattacaggctcccaccaccatgcccggctagtttttgtattttcaatagtgacgaggttttcccatgttggccaggctagtctcgaactcctgacctcaggtgatccacccaccttggcctcccaaagtgctgggattacaggtgtgagccaccgcgcccaggccttgggtttaaattttaagctccatgagggtaggggcagggtgtgtcatgtttatagctgtccccacagtactgagaccagagctcaggagaatgtggtagctgaatcagggaatggacccagtatgtggtagccatgaagcagggagctgaggccaacttctttggtcctgagcgcaggaggcagacacaccttgtcttgtctgtttgggtgtcctctgcactttgtggtcagggtttggttctcagagtctgattaggagaacttgaatggaaaaatttattcctgtttcaggaaagggcagtaaaaatatttatttccataatcaaaatggaaatttaagtcaatgacaatggaaactatttttggccatttgcagactagggaggggagtgagagggcagaataattcagtcattgtaaattttaggggtgaaataacagcatagaaataaaaactccccaaggaagcataaatcaacccttaatcgaacataaacaacaaaccacgtaccactcactcaaaccaggagctgcatccctggccgtcagatttgtgcttggctgttggagtgacgtgccgcccacaaggtcttggctactaagggacaagtattgggttttctctcttctcctgaaaggctcttgttgacagcagacagcttctcagagcctctggtcaccgacctgttcttcccttcctttctcctgtgctgttttcaagacagaaagcccagctgtggcaactgcaggtctttggattagtttgacacctggggggttcccaggtgaaaatgagggctgcagggcagggagcaaagcccacttgggagttatgtgttgtgttggtgagaaacaggttgagaaagaagcagctgctgagaataatctagtgtatattggggcggggagcatattggtggggggagagggactgtgttggtcgtgagtgaccctgagtgatgggtaccgggggttcattctctcaatctcatgacttttgtgaaagtttgcaaaggtcagaagccagaaagaaagatcaaaagccaaaaagaaagggagcagctgaccccaagattcccacccccaaggcattacccccttgaatcaggtgtaggtctgtttcctcatctgttccacacagattgagtctacaaagacccaggtctcatatcctgcaggaaagtggagaagaaaaaatgtgagactgattttttttcagagttttgactgagagagtccgttttcccatggacttctggacatccatgcctgagaagcaccttgggttttccctgctcccaagtcggactgagctcagggaatctccagggaaatgcgggggtccgctgggcacttgggccctcccaaagatccaggttccccattccagtggaagcctttgccctcctgtccctgcagcctccttggttggtgccgcctccctgggacaggtgctcctgcgtccctggcagggccaggattgggctccagagggcctgcatctgcctgtgctgcgctgccaagctccgtggaggagcagttgcctaggtcagcgtcctgtggcctcaccaggggagacttgtcttagttgccaggatgggcagagaagaggggatggagcagacacactgtctgccgctgtgggtgtcaacgggggcattttaggtggatcatggggtagctatgtgtggcatagacacccactgatttgaacggacatctaggtcttaatttcttgcacgaactcattatttccccatcaccctcatttgttcctgctgtatgaggagcattcttcccacaggttctgagatggttttatttttggtgatggctggatttcccaggttatgcagctgtatgttaggtgacagtaaaaggaagactaggttgtccctgtccttaaggatcacacacacaaaaataaggccaggtgtggtggcccatgcctgtaatcccagcactatggaaactgaggtgggagggtcgcttgaggccaagagtttaagaccagcctgggtaacatagcaaggccatgtctgtacgagaaattaaaacaatttttttccctcattttgcgggtggagtctgaggccttggaggaggggtggccgggagagtctctgagcagcacaacatgggctgaggcagcgccccgccggagcccacaccctggtcctgcgagggatgcaggagtgcctgacccaaggaggggtaccgcatgaggtggctgcacagacaggaggcagcttttcctcatcttacccgctggctcccgcggtcatatactccccggtcagtcacagacacctctgacctctgatgggacattcagtgacacttcccttgtagcccttggcttttcagttcctgaaggagccagcaggtaagatggggaaaagctgcctctgctgtcttccaagtggctgtgcatgttggcccatggatacttatatctatgtcaccagctgacacctctcttcttctgcctggctcggaaggtgttttgttttagtttggtttgtctttaataagggagcagtggccatttcagagatgggtggctgtagatcctcctcctgaaccagcagaggccaactccattccatcctggacctttccctcctccttcactttcttccagcctctcctcttgacctgtggctcagaagggcatgtgacaagtgctgtccccacctcactgacccactgattgctcttaccagatttgcttctttgagccactggggcagggactgactgggccacatgcacctgactgctgaactttgccaacctgcttgtgagctggaggagagcaaggcaggcatgcagaagaggagggttgagttgccacagctcagagcccagtgctgccaaaatcaccactttgtcatttggtacatcagaaagtggtatctacctatgtttatcacagcacagttcccagttgcaaagatatggagccaacctaagtgcccatcaactgatgaatggataaagaaaatgtggtatatatgcactgtggaatactacccagccataaaaaagaacaaaataatgtcttttgcagcaacttggatagagctggaggccattattctaaatgaagtgactcaggaatggaaaaccaattatcacatgttctcacttacaagtgcaaaggcacacagagtggtttaatggacattagatgctcaaaaggaggaaagtgggggagggtgaaggataaaaaaactacatattggatgcaatatatgctattcagctaacaggtgcactgaaatctcagacttcagtatgcaattcatccatgcaactgaaaaccacttataccccaaaagctattgaaatacaaaaattattaaaaacaaaaaaagaaagtggagtctaaaaaagggacgtgtttgagtcctgaacacagagcaaatgagtgtgggctgtcttcttgcaccggttgccccctcggccctgttaagaggccaagcctgggcaccactgggtgtgcagcggctattcctcttttttaccccctttgctgaccgagttggtgttgtcatctcttccctgaccatttgacccacctccagctggccacctccttcctctgttcctctgcctgtccatttaccaggcacctacccagggggattttaggaaaatgtagatcagatcaaattcttaaggggctcccatacggatgcctgccgtaccaagcgtgatgcttcagcatgacttatgcacaatttgggatctgccccggcctcattttctggcgtctcctcttgctactcctgcacacacatcttagactgcgctccatgacctgttgtgtttcctgaacattcttcactgattgctacctcctgcctttgcatctgctggtccctctgctgggaatgcccacctgcctagttcagtggggctcccttttttccttcaagcggcagcttaaaccgtgcctttttagcaaaacatttcccgtcacccccattaggttgtttgctgctgctgcttttgtagcctctaatgcttcgttgctgtatggtgcaggttacagacccttagctacaattctcatatcccccaaattttgaaagccaaactttttttttttgtaattcatctggctacaaaatctgaactgtcttcagacacttggtagtatttcttgatcccgcttagtgtggctatctgtgggttttgcttactcccagcgggtttgatcacaggtgctgttccaagccctgggggagaggaggtgggtactgtaggctatgtgatacatgacttattacctgtctgcaagcagaaacacctacatccaaaccgatttggccccagggcttgggataagagatataggtctgtatttcttggttcaagttggcctcttcctactaaactgtagggccttggactatgtcctagtcaatatctttgtgtttccttagaggcctcatgattaactggcactgtgagagtaaatacccagtgagactgtcttggtgaatggataatagtagctaacatttatgaagctctcactgtgtgtcaggctgtgttctaaatgctttacttatttccgctcatttgatcttaacactagccctatgagaagttacttatcttatccctgtttgatagatgggaaaaccaaggcagctgctgctgaagtagcttgcctggggtcatgtggcttggaagtggagagggagatttgaattcaggaagcctgattttaaaccacggactagtagcaattggaaggactataccttgtcccactgcagtgtttgtgccttctggctgtcacagttggaatagaactgctcatctgagagtgtttttgatagggtgataaaatgactagacatgagagttaagaagggaaaaacctcccgtggttattgagtgttttactgagtgccaaatggagctcggtacttacagaaacagaccatccactggaagtaatagctgtcttcatggtcatcttgtccaacatctaaaaagatgacaaaccacagggctgggcacggtaatccaccgtaatccaagcaacttgggaagctgaggcaggaggatcacttgaacctaggagtttgaggttgcagcaacctatgattgtgccactgcactccagcctgggtgacagagggacaccccatctctaaaaaatgagaaaaagaaaaagtgacaaatctgaggcccagagaggtaacgtgactcatctgaggtcacacagccagtgtacatcgcagggacccagatctaatacagtgggtgccttttctcttgcttcagcaaggtacctggaatgagtgctgagtcctgtggctttcagcccagaattgtggaaactctacccttggttggctatcttcttccagctgaccatgtgatttgtgaattggtgtcagacaaacttttagaacacaagaagtgttctattcaacacgtctcttctttgtggcatcaagggataatgtggtgtgtgggggccccaatcctttgctcctactctctgagcttcgggtagacaaaacaggattgattgtgtctctttcaccagttagtgtgatgactgctttcacaatcttgtcgcaaaaaccaagccactatgggatgcctccaaggtcattggctgatggtgttgtgctagggaggccctagtttgtgagtaaagctgggatatgagggacttgtagttcaggctcagccttctgttcagggtgagacatttgcccttgactgcttgtgtgtgtgggagcccattgtcaggcaggcccgtaaatctggtctgagtttgatacttctttccccctccatctgggacaggtgagttgcatttcccaggagtagctcagatgtttttggcttcaccccctataatttagtatgcaaaggcactactgttggggggagtgggtaggggacacagatttctttctttttattaatttctttaactatctgtttatctcagcaaggttcatgttctaatagcaaaataaccagactcaaaggtaactacttctttatggcaaaaatcccaaaatgtgcctgtattggcttctgtccatctgtctctttgtccttctgttcatccatccatccatccatccatgcatctacctagccatccatccatgtattcatctatccatccatccatccatccttcatgcagccatccatccatgcatccatttatccatccatccatccatgcatccatccattcatccatccttcatccatcaatccatccatccttcatccatcaatccatccatcttgtcccccatctggtgaattctttctttccttgtaggctttctgatgtaaatgtagacataactttgtatatatttctcctcttaaaaaattagatcacattatacatttagatcacattataaaattagaccccactacagaaaacatgttgttttgtaagttgctcccagtgcagtttttgccggttacacacatcaacagcaacattttcaatggcagcagaatgctccattgtatagatataacctaatttaactaatcctctgtggttggacagctgtgtggctcagctttgcctgtataaacagacaatgaacatctttgaagagtcttttttttttttttaaacccacttgtttgattattgcctgaggagacattcctctatatggaataggtgggttaaagtttgtgtgtttggtttgggttgggtttggtggagggggactttgaatacattttggtggtttatgtggctgaattttagttgtcttgctgattcctcagtcattaggttttgggggccccgataggaatataaattcattttaatatttgtgaatgattaagaaagtagatctcttgggaggctgaggcaggagaatcgcttaaacctgggaggcggaggttgcagtgagccaagattgtactccagcctgggtgaggggagtggagactctagctggtgtgtgccctgagatggtatttggacagtagtacccagtaatgacatagaagatgctgggattgtgtgttgtttcactttgcaagaatgcattccaggggtttatttgaatttctccctgcaaaacagctctacattttgtagaaataggattattagaggaggtttttagcaccttcaattacatttggaaaacactgtatttcttttggcttggttgttaaagacaagtaaataatttttttaaaaaggtaaatggtaatattttgcattcccaagagtgtgttctgtcctttaaagttgctgtgttcaacagtaaattatttgattccttctaacaatacccctgtgtgggaggcatgtataaacttccattaatggcaaacaacatggtaaacccaagctcagaaatgtgtaatttcttacccctctgggtgggccagaaactcatagtggggttttactaggatgtaactgtgggtgtttgtgtggggagggttagggggtgtgtgtcactgagggtatatagaggttttctcaaagacttatttacatgagttagtgaaaaaaggtttgtccttcttctctccctctttccccggtgtttgagtcccttgtgaggagctgatgtgcacgatgaattcatctcagccagcaggctgtttaaagtataatcaaatcagaacccctgttttccgagttacgtaattttgcagaacggacacagaggctcctgggaaaaactgcctgtccgcctgttaatattaaggtccatttataaaattagaagctatgttgaacagatgaatctgaaatggaacttgcctattaaagttttttgtttttgtttttgttttttttttttggtcagatagccttatttaacctttctgtgtctcagaggttggtggcctttgcctatggtgccttcatggaaaaagttctaaatatagctcctgtttgttgttgaataatgacttgcgagggcggatggtagagtttccaacttctttaagtcagcaaactggacaagagggcatctagtccgaaggaaagccatgtgcctgagtgttcagcactgctgctgtttttactgtggtcctgggtttagtggatgttcagtacactgtgcctgtctctcttgattgtccttctcctcccagtttttacctccaaaagcctgtaactttttcttttttttctttttttttttttgagacagagtctcactctgttgtccaggctggagtgcagtggcgtgatctctgctcactgcaacctctgcctcctgggctccagcgattctcctgcctcagcctccctagtaaccgggattacaggtgcttgccgccggctaatttttgtatttttagtagagatggggtttcgccatgttgtccaggctcgtcttgaactcctgacctcaggttatctgtctgcctcggcctcccaaagtgctgggattatagtcgtgagccactgtgtccggcctcctttaattaattcctaacttgtaaagggtacctgcatgattcagatcctgtgaagacttttgtctctcaggcgttccgcatccatagacccttggccattatcctaacagagtgttgaagtgggtggatggtttcaaaaaaaacacttgggtttcattctgtctgtttcaaggaagcattgtgcagtggtagaacgagcaccacagctggggtggcaccctggggttcaagtttctagtgtatgtgaccttgaacaagacttcagtttctgttctcggtaaaatgggggattagattatattcctggccttgcccaaagaggttttattctttttttttgtgtgtgtgacggagtctcactctgtaccccaggctggagtgcagtggcgccatcttggttcactgcaacctccacctcctgggtcctagttcaagcaattctcctgcctcagcctcccgagtagctgggattacaggcacgcaccaccatgcccagctaatttttgtatttttagtagagacagggttttaccacgttggccaggctggtctcgaactcctgacctcaggtgatccacccgcctcggcctccgaaagtgctgggattacaggcgtgagccactgcgcctggccatgttctttgtgtctcagagcagtttaaattaaataatgaaacttcttgaagaactggcccaggacacactgtccagtcttctgtgtttccacgtggttcctcgatgaacctggaacccaacgcagacctcttttttgaggcctctgagctggggagggggcagggtgagggagtgggagcttgggttttcagtaacttctctggaaacttaagtggaggagagcagagatatcaagaaaggaaatatgtgagatgagtcggactgtcaccctggtgaggaccatgggtgagccacgtgagggttgatcatctgaatagctgctgttttccttctgcccctcctgagcgagatctgaaagctttgaagactaggacacatctatgcagtatagacgtgcatggaagccccagcggattcctgaagctgcatttcatgtgaccggcatgtgactggaggtgcttggcatgtaaccttcctttgtgttcaccagcgtcagtgttctgcgtttctagggtctgtctcagaacagtgaaggcgtatcagccaccccaaggatctgcctgtttacagagaattttttttaaatattaaacttctctctattttgtaagtttacaccagtaaagctggaagttacacacaatatgaccctagctctttatagaattgctactctcgagttgcttttagtgttacaaccttgatctttaaaatcgtactcaaaaatatcagtgatgacattcattcaccacctcattgtggtctcttaaactaaatgagaaaatggtatggaaatttaataatagaaaagtttggtcctctcccaggcactgatgaacctttctccttttgatgaagaaaagtttgtaattggtcatgttgccattttttttttttttttttgaaatggagtctcactctgtcacccaggctggagtgcagtggcatgatcttggctcactgcaacctccacctccgcggttcaagcaattctcctgcctcagcctccctaggagctgggattacaggcgtgtgccaccacatctggctaatttttgtatttttggtagagatggggtttctccatgttagccaggctggtcttgaactcctgacctcaagtgatctgcccgcctcagtctcccaaagtgctggggttacaggcatgagccattgtgcccagcctatgttgccatttttatttgggctgccaggaagctgagagtccagtgtgagagtcacaatctgttggtccagttattattgtatttataatacatcctttccatggacatgattttctgtaattgtaattttactgttggttttatgcttcttgttgttagccatctcagagcctttgtgcaaagaactgggttaagaatactttaaaaacaaacacacaatgaaagagaaagagcaaggatttcatgctgttagcaaagctttagaatgtaaaaacttgcttctcttgagagagagaaagagagcgaggctgattagcatggtatttaagagtatggatgcaggccgggcatggtggctcaagcctgtaatccccacactttgggaggccaaggcgggtggatcacgaggtcaagagatcaagaccatcctagccaacatggtgaaacctcatctctactaaaaagtacaaaaattagctgggcgtggtggcacacacctgtagtcccagctactcgggaggctgaggcaggagaatcgcttgaacctggaaggcagaggttgcagtgagccgagatcatgccactgcactccagcctgggcgacagagcgagactctgtgtccaaaaaaaagaaaaaaaaaagagtacggatgcaagagtcagatgccagggctcaaatcctggctgtctcactttagtggctgtgtgacctggaaaagttgctaaacctctttgttcctcagtttccacatctgtgaaatggaaatgatatcccctccctcctcatagcgttgctgtgagaattagatgggttagttaataccaaagaccctgggaaaggtgtctagaacatataagcagcctgtaagctttatctattactagcaaatgactactttttggaattatttttcccccctggaaagttcccagtggcatttgagctcttcctcttctctcccattctcccagctctgacttttttacagattaattcttaatctaccaagccaacttttccctgctgtgatttgtaccgttttttttttttttgagacagagtctcactccatcgcccaggctggagtgcagtggcacaatctcctctcactgcaacctctgcctcctgggttcaagcgattctcctgcatcagcctcctgagcagcttggattacaggtgtgtgccaccacacctagctaatatttttttgtatttttagtagagacagggttttgccatgttggccagcctggtctcgaactcctgacctcaggtgatctgctggcctccgcctcccaaagtgctgggatttataggcatgagccactgtgcctggcctggtttgtaccttttaaacgtattattattattattttaaataagaaagggaaaaaaaaaacaaaaagatttgccctctaggatctgcatactttttttagaagatcaagaaaaagatgaagtactttctcttgtctcgagctacagtgtggcatgtctggcccaatccatctgtgtggtttagcaatgagggctttaccccagtttgtcatcttggaagatgactttgcttctccatgccttagtttccctatagtaccttggtgatccgtttcactccattgttgtctccaggaaagcatggtttctgtctcctcctgtccttcccccatccccaaccgggggccattcagtagacatttgctgaacacacggatgcgtggagactgaagcctctgcttggctgccttgtgcatttcttcggagtttgaaataagataaccaaagtgagagtaggtttagaaaaagccccctcgaatggaagggtttttgattcctgtcttttccctactctttgatgatggcaaaatgctgataaaatctgagggttggatgaaatgaaatagcccttcagggtcctctgccatctgggtaggtggtgattaaaaatggcaagcctcacagcttcccttggagagctgtctgaggcactgctgaaggtggatgtgcaaaggggcttggcattaggggttggctgaggactggcagggcagctggggaacgcctctgaaagcaacactccccaagatctcattaaaatgcttcctctggccgggtgcgatggctcatgcctgtaatcccagcactttgggaagccgaggtgggaggatcgcctcaggtcaggagttcgagaccagcctggccaacatggtaaaactccgtctctactaaaaatacaaaaattagccgggcatggtggtggatgcctgtgatcccaggtactcgggaggctgaggcaggagaatcacttgaacccacgaggcggaggttgcagtgagccaagattgtgccattgcactccagcctgggcaacagtacgagactccatctcaaaaaaaaaaataaataaataagataaaaaaatacgtcctccaatggactgagatggaggaaaagggtttgggaagagagacaacctaaggctggtaggagactctgaactatgaatttaatggcaattaaagcagaaagacttgagcaagtagcttttttttttttaaccgtgccctgtagttatgatttgttctttgtagttaatttaaaataagcataatctttgtctactagctggctgtcctgccagaattgcatatatttattttcatgactatttttttgcactgaccaggaatccgtcagtgccaggagatttctctctggacatattttggctttgttggtgtcttcccgaaccccagcccccaccatccctgtctgccatttctttgagaagccagcaagtatgaattgttagcttttcctctgaagtggataatatagtaactggtggatgttctagcagctgtgcgatgtgctagaatcttagaccatacctgccttgcagtcctcaagactgtgacagaagtgagctgacccccacctgcctttacaccagccagctcttaaacgggcaggccaaatctggcccaccacccattttcacaaataaagttttattggaacccagctacacacatttgtttacgtatggcctatggcagattttttgttacaacagcagagtcaagtagttttgacagaggttataagggatgcaaagccaagtgttgattacctggccatttatagcaaaggatgctgactcctgacatacataatgagcctactgtgtgccaggcgctgttgtaggcactggggatggagcagtgaacttaacaaaatgctgagatgtgtgtatagtagtcaattagcgataagtgctgtgactgaataaaacagtaaaggcatggagactgaaacggggtgaaacggggagtgttattttaggtaggattgtcagacaaggcccttgtgagtgctcttcagggacagtgctccaggttgggagcacagtgatggcaaaggcctagaggcagaagctggcatgtgtgaggagtagcagggaggtccaggtagactatttggggctagtggaaggagctgaggctggacagacaggaagatcagatcctgtaagactctcataaggacttgggcatttattcggtgtgcaaggggaagccacagtggggttctgagcagagaggacttcagagcagagtttgacaagagaggacttctgtgtaggaggcccaccagttactgcatggcatagaaacagcagagggcacgggtaacggtgaagagggcaggtgggagctgctgcacttatccaagggccagggtggtggtgaggacggtggtgagaagtggttagattccagctatgtcttgaaggttgagctatgggatctgctgaagactgggatgtaggaagttctgggaaaggactattaagagtaaggccaaggcttttggcctgagcaaataaaagccttttcctatgatgggagaagactgtgaggaatagctttggaggtgaaagtcagcgtttggaaacctttccacattcccagttttcttcttctcttactcgttttctttgggaaagagttggaggaatgactccatctactttactgcttcttttttcggggtaatacaggacttgaatagtagttaaatcacctgtgttaccaatggtctttaaaccaaaactgcattactcaatcaggaaatatatacaggtaacctgcctttccttcattctgagacttatttcttgttcataatgcttgtgaaatctgaatgcatttaaataatgtacatatttaatatgatggcatttcattcttgaaaaaggtgttattaattggtgttgcatcttatggttgttataacatacagtaattaaagaaatattataggcattatatattgagctcttgcgtgcgaggaactaaaatgtgtgttatttgcctactgccgcgtaacaaattaccccagaatttagcaacttaaaatagcaaacgtttatcatctcacggtgtctgagggtcaggaatctggagtgggcttattagctgggtggttccactcagggtctctcatgtggttgaagttaagcagctgttctgggctgcagtcatctgaagacatggccaagcaggagcttcgccttccgggatcccttgcagggttgtttgctggaggtctcggccactctccatgtggggccctccagaggctacctgtgtctgcacagtgttgtcattgtctcctccagagcttgggcaccaccatttcttttggctcttaaaattctcttctaggcttgggattttaacccaggtttccagatgaggaaactgaagctcaaggaagttgattaccttcttcccaacttacagaagccagtattagactagggccctgaccctgatcagcctgacaagaaaacccttgttttcttttccacggccccacagagtggcccatgtttctcaaatgctgcaatctaggattgaccccaggaacccctttggggtcattacattttacttccactgtctgatggcattggtgtggtccatgcgaatactcacagctttaaaaccatctgattgtctctgagactcattttctctccactttctcggcctctagccttcacggctgggtgtctcagaggctgggctctctcctctgggaaggctgttgtctctgtgtcgctggctagcctgggtctcaggggcagtgagaatccctggcggctgtccctgtcgtgtttaccaccttggcaacaagcgctgctcttggcaccacggtcgagtccttagctggacggtgactcgggctgggggctccttcttcacatcatgaattggtcttttgccaagccaaaacagcggctgcttgcttttcagaaggaaaggttgttcatatttattttttaattagaaaatgaatgcatgctccttacagaagattcaaaacatatagaaaagtgcaaataaatgaatgttttggtatattatcatttttgtgtgcatacgtatttaaaaacagaattggaaaagaacccagaattagaatcacgctgtgttgtgtgcatgtgtatgtgcttttgcatttactagtacttagtaataattttcacgtgttactagatggttgtaaaaacatgatttttaattggtgtgtaacgttctctcatctcaatgtaaaatacagatacgttttaaatataccttaccgccaaggacgagatttgtatgggttttattttgttttttatttatttttgagacagagtctctctctgtcgcccaggttggaatgcagtggcgtgatctcggctcactacaacctccacctcctgggtttaggaaatcctcctcctcagcctcctgagtagctgggattacaggtgtgcgccactatgcccagctaaatttctgtatttttagtagagatggggtttcaccatgttggccaggctggtcccgaactcctgacctcaaataacccacccaccttggccccccgaagtgctgggattacaggcatgaaccactgcactggcctgttttattttattttttgagacagtcttgctctgtcgcccaaggctggcgtgcaatggcacgatctaggctcactgcagtctctgcctgagaccataatctctgcggtctctgtccatgagaccataaataaagaataaggagcttggcaggccccacgcagacttgttgcatcccagttgcttggggaccctgaaggctgcataactcgtagccgggtctctgcctggaggagcgggctggtgttaattcactgacccggggagctgtgcctgcctgtcagcctctccatcttgttggtgctgaaaacctctcttcctcattttggtccctgctatggctttttattcaaggctgtggtttgagttctaccacaaagcagataatgtggcatgagcagctcacgcagggactgccctgcctccctgtcttcacctacaggggctgccgagatggggaagggccccacccctgagttcccctttgtcttccttgtctcctttgcaaggagagtcctttatttgttcttttaatgcaactggcctctctgaagaggctttccagatcaatttggcttgtcaggggtgccaggcttaagttttcaggcatctaaagaagtggtgggggagaggggatcagacttttctttctctttgtggctttcaaaagaaaatcacggacgttaaaataaatgacgcaaatatctgtattttttgtatcaaagagacaaatggcataaatgcagattatagggtattccttagaactgtccatcacacaggagctcctgggaaaggcaagcagcccgcgaggcaccacccggtttcactgagcagagggtgagtggtggcttcgcgtttgggcagcctccagggggtcggcatatttagatcatcgtctcacggattgattcaggattgtcttaaaagccaactcggtttccaagtgtttcattcttgcatgcacgcttaagaaagtcaaagccatttccattgtcttctgtttgatctgcactgaccatccttcagctcctgcctccacttgcgtgatgctttctcttctggttgaagaactggcagcgttggtttgggctgctcctccctccctcgggccccctccctgtggcacggacttgccctgctgtcgtggatgatggtctgtgtgcaaggggttgagtcccgtttgccatgctcctggtgtttctaacttctcagcctttcgtttcacaccctgccatgatgacagtatatccatttttcattctttgggacattttctctccaaggaaagatgctcatgcacgtttgcagtgggtgaactgttgccttcctgtgatcagtcattggtagggctgcttctgtgtctccacccgtgagtctccatcaccagttgaggacctttgggtctcctgactcccagaaacttttccagcttcccatggtctgtgcttagggtgtattctgggccatggcctcctggaaaaccattttcccagctgagatggattccccaaggtccctggcctccagtgtggcggtccctcagaagctcatcagtgaccgggaatggaactgactgctataaagttgtgagcctgcccaaaactgggcagcagaggtgttggaattcagcccacctgggctcaagtgtgggttccagcccttcctagcttgttgaccttgagtgatactgactaacatttcttgaccatttgccctaggttggcttaccttaactccatgatgtctcatttagtcctcacagtagccctctgagaaaggtattattcttaccttactaggcttcaaagaggctcagatccatggagctagtaagtgatgggccattgtgcaaacccaaggagtcggcctccagacgcacctcctcccagccactacactgcactgccttaacccttgtgctgtacttaacccttttgccagtacagccaaaggttcatttcccagagcctccacttctgcatctgcagaatggaggtacagtgtcaacactgcagggctctttggaggctgaaatgagatgaaatataatggatcaagctctggcactaacaaatattagttccttccttttgttgccctggaacaaagggtggggcatgagaaatagaggggcattgatgttctgcctggcaaccttgattgtaaagagggcaggacaaggaagggaaaatgtagaggatccccatcattgtggctgagtcattttaccgcagaagcctccccagcaatggcctgtggttctgggggatgggagggtggtgtgacactgggaagtgttgtcaggtagacacttgagtcttgattgggatagagattgggtacttgaccttctgactctggggtagacatgggattgggccatggggaccacgcaggtacactctctgccgatttccagcgtgccagacattcttatcagcgcatctgagcccagcagcagggaagcccagtccctggtcactgtttgcatcttggctgctcctccttggcttgaagccctggcagttgcacctgcagggagcctcagcaggaatacaggttcacctccgacctgggatctgcattgctcccccggtatccattctgtcctggggtgtgctcaagtgcaggtccatgtagacaaattcagatgctgccccagggctggtgtgagagagctgctgcacctttccctagccctcttcttttagaacatggatgatatgagagtagagaggggctccccagtcagaaccagggctggggtgggccagggaaggaggtcaagtcaggacagagctgggaaggatgctggcagctcagtgtggccccagcatcacctaggaacgtgtcggaaataatctgcatcttatccagctcgcagtggtgtgtgtgcagaaggaggtctgagaagaactgggatgtgcccttctacctacccacctgcatttaaaagaaaggtaatcacgtatttagaagatggaagtgagttaagtgtaactaaagtggggaaaaaccaaacagtgcctgagtgagaactggagttgggtacatcctgggttggtcctcacactgccgcctggctggggaccctgtaccatctaaggccaggatgtcctgtgtacgaccaggttcctattgtcagtctgttggcccctctgccaaggtgagccctcctctttcactccctggtacattgtgctgagaacatgactttttgggagagtgtttgtagcaagtggtagcactacgtaaatagctttgttggcagcttttgcttttcttgcttgtattgtacaccttagtgtgttttttcttttcttgctttattttttttggataacggcaaaatcaccgcttgtgggcaccgccacagataatacaaaaaagccatttgaaaagagctttatgtcagcacagagtacttggaattgaagacctccagggatttgcctttgttgctcaacttttctctctcctctccctctttttttccccctttcttttcttcctctccttcttcctccttgttctctttctcttttcttccttctaacttgccatggaaccagagtgagctacatattgccctattttcagctgatttgcatgttagagcagagtaattggtgtttaaccagaacaaaagaggatctgttttctaaaagaaaaaagaatttttgaagtagatcctattgcatctactgcctttgtctctcctctcattaggaattgaataggatggccccgtaatgagaatgtgggagatactgctttggttgtgatgctttttgagctaattggtttgaaaattatatttgatacagatctgagggatgttggcaaaacacctctttgatacatggacatccggtccctccatcagcaggaggatgggtagtgagaggcagggttggaacgctgtttaccttcctggttgaacgctctgagaggccaccccctgagattttggtctttctccaaatcttcatgttggtctgtgcctggatgaagaaagccagggagcactggaggacaaagtttagtagaaaagtttgtagctcatgatttgacttctagtgtgttttagcgaagacatgaagttgaagaatgacttttcctcttgttcagaggaaagtctaaatctggactagaaaattgagaggatattagttaaaaacttccagactgtccgttcttcattttatatgcagaaatcactttgtcagctcacagttgcagtctctttcttctggagttaactggcatctgatggtatcatgtctttttgtgaaaattaagtgaatttttgaagactttcagtaatgtttcagtgaccacaaaaccatcttaaaaaattagaaaccaaaatactactacatgaacttcgaatgatagaaggggaaaatgagttataatcacatcattctaaataacagctgttttaaattttaatgtattaatattaccctgtcttttgccattataagtcttacttacatacacacacattttgaaatagtcattgattactttggggattgtgtttaagcaaatatttatttaataataccagttaaagagttctgtgacatttattccttttctgaggtcacccaactttgcaaaagttcaatattatcttgcaaaatctgatagcagattttaaaaaaagagacacgggtcatgatgacttctctcagaaaatgtgactacaatcaattttgctgtctgtacgtttgtttgttactttatctttctgcacagcctgtgaggtagggaagggttaagccctcttgacccactttgcagatgaaatggagctaagcttagaaggaggacagcaactgagatgagcaaagttcgaagccaggaggtgcagtccccagctttatctaccaagtcaactgtctttccttctctcccttttgctttttttttttttatttggaggtaatttaaaacttacaggaaagtttttaaggataagttcaaagaacatccttgtatgctccactcacatatatcctttatcagcattttaccctctttgctcaatcagttgctctctttttcactaatagggttttttccttgagtcattagggaataattgtacgcattgtgaccctccactcctaaatacatcagtgttcctaatggggatattcccttaccaacttcagtccagttatgaacttcagaaatccagcattgatacagtgcttttatgtaatctaccatctgcatttcagttttatcaattgccccaatctgtcctttatagaattctttttccctcaagtacaggatacaatggaggatcaggtataacatttaggtttttttgatgactctttcgtctgctttaacctggaatatttccctagcctttctttgccttttatgacattgccatttataaagaatacaatcctcccccaccttttcccaatagaacattcttgtctagtatttcctcatgactagattcaagttatgctttcctggccagaacacgacgtaagtgtttttgtgtccttctcagggtatcgcatctggagcacttgatgtccatctgcctctctttgatcacctggtcaaggtgttgttagatttctccactgtatagttactatgttttgtcttgcaacgaagaagcagtctgtggggagatgctttaagatgttcctcatggaagtttcctctgaaagctagcattcactgatgattcttgcctgatctagtctttacagcaatggttacaaaataattttctaattcctacatcccctctttatttaccacttggcccttggcatctgcggtaagcaagatcccctccttcttacccactaattttaaaatctatttcttatagatatggacccatggagtcctagtatttcaatggcttataatcattactgtacataacaattttggtgctcaaattggcccacacttggccagtgggaggcccttcattctgattccctacaacatgatcctgcgccggagtttatttttaagcacttctttactttctggcataacaaggtgttccaagctcatcttgtgtctcccctgctccagacctggagttactcacttctccaaggagctggtttcttgtagtggggattgcatttagagaccaagataagaaggttactagagcgtctttgctcaatgttactggagtgtcttcgtctctaggccatttcagtggagagatataggaaacatgagtgtacacatatacacacagatacatgggcatgtccatgcatcatatacatacatattttggaaatcatgggttcacaccacacctccaagtttgctcaatccacacttactagtttgctcaatccttaatacgtctaaaatagagccagagtggcttgcccattccactacaaaagactggcctacccgaggtgggtggattacgaggtcaggagttcgagaccagcctgaccaacatggtgaaaccccgtccctactaaaaattcaaaaattagccgggcatggtggcatgtgcctgtaatcccagctactcaggaggctgaggcaggaaaatcacttgaacccgggaggtggagcttgcagtgagccgagattgtgccactgtactccagcctgggcgacagggcgagactccgtctcaaaaaaaaaaggcctactaaaaaggaagggttcaaggcttgtttgcatttctcttgcatccgacaaccacccccatcccagctaaagacctagggtgcatagttcaaccgtgtgttcctcagtcatttggattacctcttccctccctcccacctgcactgtggttatggtttgctgtcagtttcagggttttcttccttttcccttcccatccttgttaatttaattttatttaatatatgggacattcatgtgtgtttaaaagtttactgagagaagccctgctgccatatctagatctctccttccctgtttcccaacccctgagaggtaaccaacctcacccttttctgatttgtcttgtgtttctttttgtaaagataaacagatatatgtatattttcttatttccccttcttatataagaggtagtgtagcatatactctttaaagcatcttattatttttaaaaattaactaaagtccagctggatgtggtggctctcgcctgtattggggactgaggcgagtggatcacctgaggtcaggagttcaagaccagcctggccaacatggtaaaaccctgtctgtgctaaaaatataaaaattacccgggtgtggtggtgcatgcctgtaatcccagctactcgggaggctaaggcaggagaatcgcttcaactcaggtggtggaggttgcagcgagcctagatcacaccaccgcactccagcctgggcgacagagtgggactccgtctcaaaaaaaaaaaaaaaaaattaactaatgcctgactttattccaatttccctagtttttccttactgtcctttttctgttctaggacatcatttacatttaatagccctgtcttcgtaggctcctcttgcttgtaacagtcgcatcttattttttgaaatgtatcaataggtaggtagcggttgaacaagacggagaaagagaaggtgaaaggtgagagatgaaaaatgttaggtccatatcctgcaaatgttgttatttatcacttctgtgattttctctatatccacctgctacatgtattattatttacttaatacttttctttttgttgatttattttatcaccataaaaacattttgtaagaaaactttacatcattactataaatgagaaaccacttgctcacttgtatttcgtgagaattgcatagaaattgcagcattttgaagtttaaaaagtttaacagcgaagtaaccccttctcatccttatttttaacaggacttgagacatgtaaataacacattttgggggggggggtctgatttttttcttaatgaagatgtaaacccatggaattcattgatctacccctttgctctgataatgtgcagtaaactgaggctgagccttccgggggtttgagaaagagctgagtcatatggggaaataaaataaaaatgtgaataagtgtagtccaagctgggtgagttaaatgctttgaagaacaataaataatctttctttttttgttgtttaaatcattagcagaacattttgcaaagtgtctttctttcttttcttttttttagacagggtctcactgcattctgactgaatgcagtggcacgatcatggctcattgtagcctcaacctcctgggctctggcgatcctcccacctcagcctcttgtatagctggaactacaggcacacgccaccatgcttggctaatttttctattttttgtagcgatggggttttgccatgttgtccaggctggtctcaaactcctgagctcaagcaatctgcctgtcccggcctcccaaagtgctgggattacaagtgtgagccactgtgcccagccaaagtgtcctatttttacaaaacctaaacagaataggtaatcgaacagagtagggctaaacatatatatgtttgtgtgtgtgcacagtttacatttactctggttatctttaagataatgccttaaagattcagggctgcatcttaggcagatcaaacacatatcagttatgcttatgtcttttcatggagttccaaatagaaaatttcccagcactctactgtagtgacttcttaattaagcagctattagttaatacccttcctcaccattgttcctggaaatgagttctagaagccctggcccttaggttgccatagataataaggatgcagtgtgtttcagactagcattgtagaaagaagtgggaattatcagagcaccccacagtgtaccatcttatcaagatttgaattatgagacctgtattccaaaatagctcttttaaaatgatcttagccgttattttaaaataatgagtgtggcattatagcaccacttttcaaattttaagtgaagaaaagaaacacatctacccatcatcctgcctgtgggtctcattgctttccagccccatccgcatgtgttcagaccccttcatgcaggcattattggagtacagatgtacatgcttctgtcttgcgtttctctctcagcatcatgtatgttgaaacccatggtacttatattggagttgttctgtcttcacgattgtacatgtgatgttcagcgaggtcactccctgggatttctacccccctgaaagcaaagaagtggaaattttgtcctggtttctctcttggtagagtaggtttgtctctaggttctccacaatacctgcttccgtggaattggctggagtcgatgatgttagcaactccttctcaagtcatttcagcgatccttcagtctttttcaggacattgggtttccacgtatctgaccatttcttctttcttctgttcactgaaccaacactcagaggctgtgccctttgccaggccctgggctgactatggcgatagagcggtgagcaaggtaagtgcatttggtctctgcctgcgggagctcacaggtcatttgcacagttgtgtgcacggtgcccttgtgctgcgctgcgtgtccagcctttctcatctgctcatggatgcacacatcgcattagaaggggagagaaggtgacgtggctgtaggaagactctactctgcctttctaaatgctaagttctgtgcatgctttggcaccttcctagtggtacaagttgcttgtgatacatctcacttggacatatctatggtagtccaaggagtatgagggtggttagactaggggttgagttgggagtcacaggaggcaggcagggagtgatggatgcctgggttgtcccttgggacaagaggccactgctcagtttcaggagttctagtgttcagctcacttctgtacccagggaggatgactgatgtggttcggatatgtgtcttctccagatctcatgttgaaatgtgatttgcaatgttggaggtagggcctagtgggaggtattggatcaagggggcagatccctcaggaatgacttagtgtcatccccttagtcataagtaagttctcactctatgagttctcatgacagctggttgtttaaaaagcctggcacctcttccctctccttcttgccccctttcttgccatgtgatacattggctccccttccccctccgccatgattagaagcttcccgaagccttcgctggaagccgtgcagatgtgggcaacatgcttgtacagcctgaagaaccgcgagccaaaaaacttcctttctttataaattacccagcctcaggtacttccttatagcaatgcaaaaatggactaacccaatgacctatagggagaatggtgacattcttaggttggtgtccttctctttcccaactcacatcccctctcagggtgttctggcttcttagctttctgttactttctgaattaggaaagatctgatattatttacactcgtgcctgttaactctcccaggtgctgtccaagccttttatctcaaattgtggactgaaaagctttatctctggtttaaggcttcaagtcctggccagtagactaaggagatatttaggggcacagagaagccttcctgaagttcctgaaataagagcattctcgggctgccctcctccatggttcctggctgaccacttgtcttctgcctcggggttggaagcctgggatgaggactccaggctctcgtctcggagcccttccttctcctgttactgggattctcctcagctcactgccttctcccttttggtcactgctgcccgactcctgacccagcagcccggggattttcagtgtgtgtctccgtgtgtgtgtttgtgtgtgtgtgcacgtgcgcttccatccctgagctcactagagaggcatagggcagcatgaacactcacggagaacgaatgctcatgagaagcgtgtggtaaactcaaagtttttccatttggcacagttgaggagtaacgtttaaatcttcttcttaattaacatttatgagtgatcctgacagtgattaaagaaatataggaaagctctcaacatatgtgtatgtcaattatatgtactgggggaagaagaaagatgaggaaaaatgaaatacttgaatgatctgctttagaattgtgtacatttgtgtctaagtaccatgtcatgaataatagtgctaagagtacttaagaagatgaacagatcaccttttatcagttttatgacaggagtcaagttggtgcactgcacatgtgtgcttagttccagcctgtctgctcacaaccaggaaccacacaaaaagagttaacattagtcatggtaagcttagcaagcagatacacttcaaaattttttctccttgaagctttttaaagccaatttcaggaagatatatactgaaaaactcaaaggagaggtgacggttgggaagccaagaaataattttttactctaagaatattctagaacccagtagtacctgaaaaatctctcaaatacatcctcctttgctgcccttttggaaagattaaagcatatctggtgacaccagtaggtgtcatctgatgggttcttgctgcctggcgctgtgtgaattataaatgaaccatatggaaccactttatattaagtaacttacgtgttccagtgatagttatttaggttgtaatcttctcagaatctgttgttaatgactggtttgttttcacctgaggttgttaatgctccaaagcctattgttaacagtgccagaggtaggggtgtgtgtgtgtgtgtgtgtgtgtgtgtgttcatagaaggatgttactgtggaccatatgtaatgggctgatagcttttatttttttgccttagagtccagacatggtgctctggaatagccgttgtagggattatgtttatttgtcctgcatgaatgccaattttcggtttgtgcaaggaagggatgtgtctggaaacacttggagtactggatggcctctccatgtgattggcctttggagaccgcccattgcctcaggataaagtccaagtgctgttgcatggcctggagggtggccgtggtgtgttcctccctcctccccagcagggtcatttctccctctcacaccccaccacactgagccactggcagtgccctgatcacactggctgtttatgcttccctgcctttgcgcaggggatccctggcccggaaagtgctcaaccccatcttgtcaatttggcttcagcatcacttggtctctgagcgcctcctgatcccctctgcctcctcctcctgtgcctgctaggctgtgctcctctctgtcaataccatggcacgttttagactttttgttcacccactgtcatcgtatcagctagggtctctgtaggaaacagacacctcatgggagggggtacttgagaagattgaatgaggggattgtttacagaggtgtagacagggttaaaggttcagcaaggaaggatgaagctcctcagggttatcagcaatgctaagcaggctaaccacccctaggcctgaggggcaagaggagggagcaggtactgaaattcagctgttgtggaggttcccaactggacctgtggccgaggaggagtgaggcccagcaagcaggggcatcactgcctcaacttctctcttcccaccttctcttgatagtgtcttccattggccaagcccaaccggaaaccaggagaccattctagggaggtcagtcttgcaaggcacaagcagggaggaaaagagcagatgatggttctggagggtcaagcagaaagtaactagcacacccacattctcttgtgggagtgtaggctcagtaagggcactagccatgtcattccagtattcccagggcccatcatagtggggtgctgggactagggcttagttgccctccccagtcctcatcaacacctcctagccaccacaaataaatacaccatctaagccaaaactgagtgcttgtatagctttgaaacaaatcctcagccccctgcctgttcccacttagaagggtgctgctcctaagcccctgttttatataaattctggagcccccacctacttagctcaatgcctgattcaaagtttgtgtgtatggccaggtgcaacggctcatgcctgtaatcccagcactttgggaggcctaggtgagtggatcatctgaggtcaggagtttgaaaccagcctggccaacatggcgaaacctcatctctactaaaaatataaaaattagctgggtgtggtggcgcatgcctgtaatcccagctagttgggaggctgaggaaggagaagcgtttgaacccaggaggcaagtttgcaatgagccgagatcgtgccactgcactccagccttgacaacagagtgagactgtgtcacacacacacaaaacaaaaacaaacagccccaaaaaaccacacacacacaaagtttgtgttcagtgtatacttgatggaatgaatgaatggatagatgagtgagacaatgaatgaatgagaacatacattgtgtgaagaaacactgagaggaaggtgtgaggcaggtcagcttctcattctttggttccctttcatattcataaggtactggaggtactggatataagtcgcaggaaagtcggcctttcctatctctttggtttgctgttgacttccagcacagtgtctgcaccaagtaggcactcaacaagtatatgtcacgtaaatgaatctggatgttaagtcatgaacctggatggtttcttctttagtggtctactctgaggttcaccagtgtgtaaagtcttgggctaccatctctgttttgggacctaggaccattttggtatttttcccaagtagagaaatctgtggccgcccttcctatttattcttttgatttctggaacttagatgtctgaatagaggactcgatgtttgttccttttattttataaaggaagtaggggaggaaataggactctaagaccttggcggaaaagagaagggaagcagatgaagaggagctcccaggtgaaggagggtggaaccctgattcctaaatgggaacaggtttgttcggactcacacactgagcagctctgtgtttcttcttgctcttccatgctcacaaaggtctgtgattttaggaggaggtgttgagggaccctggaagaaagataaagggtagggtcagaggaataaatatcagccaatccctgaataattgtcaccttaaaaggctgtacctagacagggtttgtggtcttgaaggagccagtttcttatgttcaagcttcttggtctcttcttggtccatgtggatttaacttggatggaatccctctggctaccagtttgccttggccagaaggagaagggctcctcctagcctcctcctctgctgcttcagccctgctgggcactgagcaatttcacagggcggtgttaaggatcagggtgtggagagtaggaaattagtaatgactggactgggtgagggtgactcttgtaattttaaagaaatgtttaaaaattaatcggttctctgctctgcagctttaaaaaagtcaagatggagaatttcccactgtgacgccttttatttctggaaagttgagtcatttaatgatgatttgaatatcaacagttcattggcccatctttccccagatagctcccgaaaatgcgctctcctccagagaaggacacttttcattcctttagttttctggcaactcaagtatagcctggcctcctgtgtttccccagaccattatcggagttgtactgaccaaatgggagtgggttttcacttgtacccactgctcctgtttaagtcttccttggaccaactgtgggtaggtgtaaagcaggcatggctgtgacttccacattggatggaggcttgattgattcgatgtgattccttgggttttcttggggttgtactaaggacttgtgtgcccaggaggacacaaggctaaagatggacttggtgcactgatacatggttcagttaggaacagatagtggaggagctcctaagacatttacctaagatattctaagggaaatcgtagactcttatttcctttgttatttagggagtagttggtggagatgtaggtggtaccagtgatgccatttctcttgtaggagcatttgctgagtcaaagtatctatttcctctggagggtccttgaatttaagagcttccagtaccagtagattgaagatttagtctgattataattttttccttgggtctcagaacattaagagtattcgaagacctggttctcttgtttcctcattaattttggtcctggatggtgcaggggttggactgacctattaagtctccttttcccccatccatgagcagtaagtctgtcatggggatcagcaaactctttttttttatgtgtgtaaagggtccagatagtaaatattttaggctttcagggatcaggatgcaatattgaggattttgtgtaggtatttaacataacaagagagaaaacatttacggagaatttttactgatgaaattcaaaatataatgacaattattgagtacagttttttaaaatacacatttgctaatgagaagaatggattttgtttcagggggcataacattttgctgaattggagtacaaagttactgttttctattatcaagtcagttatagatgtttgtcagtaaaaaccattcttagttctcaggtaagagaaaaacagatggcagacctgatgtggactgcatgctatagtttgccaacccctagtcagtagcatagctctggtgatgttagttttggtgtggaaagtgtaaggacgtggtatggcccaggaccccatgttgctctttgaatggctgggaaggtgtttgaatgccacaacactggaattttgtgtatttaataaatagtggtagagaggccaggcaatagaaatacagaagtgagcaggatggtcaaggtcaatgccctgggagagcttacattctaagagagatgataagtgaatataaaatttgattccaggtgggggaggggtgtttaaaggatgtctctctgggaggtgatatttggatagagatctgaactaagggagggaatggtcgccagaactttaggtgaggcagcagcagaggcaacatcttgagataggagaaagcttgataagtgtgaacctccaggaagtgcaggtgagagcagagagggtgtgatgaggaagggggtgggagaggagtttgaggagagaggcaggggccagatacaaggagcctgggagcttgtattaatacaaaggagcatgcgatgggatgttgttggaaggattcgagcagccagagaatgatgcagtatgattaactgttggagaagatctctctagctgctgggcagagtagactctagaaggcaagagtggaagtggttttatggggccacaaaactgagtgttgaaaataaagatagtctgaaaaatgtggagtctgtgaccagcatatttttaagattgtcttctgtgtcataagtcaggatccttctggtttcaaataacccaactcaaaggaacccaaccagaaaggagaataccttggcccacataactgtaaagtccaggagttttcctggttttgtcacagctggtcccagggctccggtgatgtcaccatggctctctctgtccctcatctctcctctctccttttctctgtgggttggcctcattcactccttttgcacgtaaatgttttccatgagttggtgaagtggccgtcaggattctggatgcacataggagcttggcagctcccatggaaatagtactgctttctttcagcatctgcatatcactgtcaggaaagttccctgattggccttgcttaggtcacaggtccagcccttggaccagtctgtgatggatagtcccttggaactgggtaggttccctgaagacaggggtgctgaacagacacaacagtgtatgtccagctttggtctgtcctctttggtctcccttatttttctcttccttttctgcctcagacctttctgttagggatgcgtgccaaaactcaagtggaactggtgtctttaccctcaaaacacagactcctgaattataatcacatgctgattttcgtggttaccactgatcatgaccacatgattcttttgctctgagggttgggccaaaccccctcccttgttctggcaatgctattttgagaggccatgggggcaggcagggcctggcgggttccagactctggctcaccttttaataacttgctctgtgaccctggatgtgccatttaacctttctgagacttagtttctgagctgggtgcatcaactaagatatccatcaaatactttggaagatgtaaagtggcatttagatgacataggctatgtttcccaggctaggacatgggctatgtttcccaggctagagtgcgatggcacaatctcagctccctgcaacctctgcctcccgggttcaagcaattctccctgccccagcctcccaagtaactgggattacaggcacccacccccacgcccagctaattttttctgtttttagtagagttgggttttcgccacgttggccaggctggtcccgaactcctgacctcaggtgatctgcccgcctcagcctcccaaagtgctgggattacaggcttgagccaccgtgcctggccagtcttttttaatcttttgcttaggaaagagagtgacggggaaagaaaggtttaattctggaccttactacccacacataccagatctcccctctttgcataacttcttttttggcgggcatgtttcttcatttttatcttcttgataactttgatgccctggttggactcttaagcagattatccttgggtggggacgtcagcagggagaaccaccccagactaagacaagttgtgttttgtctgtcagccaaaagcactcttagcaatccgacatagacatcattttagatgtacagagaagaaagaacaacacagtattgataagatttcagcaagatcccccctcccccaaagacgaaaacacacaaaacttaatgcattgctctgtaatgccttggttcctagtttcctaattaggcctgtggtttagcagagtgcaccatctcaatacacagatggtttttatgtaaaaaaatttttttcaaatgttaatttccagtgactgatgttttatgcctaaatcattttccattgtttatatttgataagaactgtatttgaactgctcctttataagttggagtcttttgtaatgggatttaacttactggttttacaggtgtatgaaaatgttaagccgtgtattgtatttgagagtttgaaaattcttcgttgcagctaatttaagaaaaaaaaaattaaacaggtgattagcagctgctttcggttttgaatgtcctcgctttggggttttgtgtttgcttattcgtgtgcaaattggtgtggttattttggaccggttgagacgctccaacattgcacctcccaggccagctgcccagggcccattcagtagacccttccccgcttctcggggctgatttgttctcatcttgtgtgctcgagagcttgctctctccttaatgattcaggccttcctgagaaaacaaagcagctctggccccgtttctccttgaggacagccttgttcactgccacaaagaccctgctttctccccaagcagaggaactgcctctcggggcagccaagaaccacagacccaggcggctgcagctcctacttctgaacttctggtctcccgagtgacagcttctgcatggtcttaagctccaggacccccaaggccacccagagtcagagtccaccgccggtgggaaaaacaacattaggaagtgggtggtgtggtgtagaaggggctgcttagagcttctggccttcggagctggatccagccacttgagcttcattcggcagcacacagacacctcccctccctcctgctctgccccagaccttgtgctttcttggcaccgctgggtcgtgcctgctcagacctggtcagtgtgcttgccagggcgaggagagctttgcataggccgctgctgcttacttattaacgatgacgctggtgggagctgcgccaccagctccctatccaggcctttgtggttgcatcctgttcacataaaggtgaaatcatgacctgcccgacttgatttttcagttgaggggcttttgtgtatgtgtcgttcttgatccagtaagaggattgtgctttcattcacaaagatttgatcagtaaataggaagagaaaatactcaagggagaaatgcttagtgttccgattaatacattaatctttttttttgatgagctgaaggtgctctgttgtttctcttgactgagtctttgcccttacctttgaccttagtgacttgatcatccagccaggatctctgtacagccccatctcctttctgaggtcttgtggtcacacacatgctttcctgcttctgtcttgaatgatactcagtgaaccccacagctttgggggctgctatttgaggcaccacacttggcaggcttggctcccacggggagttgcaaagcttgcagttatagaccttggcaactatttgcccttaaagaaaagcatcagtgaaaagttgagggcagagggaagaagagaaagatcttcgtgggtttttctgtgtgtgtgggggggtgtgtgtgtgtgtgtgtgtgtgtttatggacagcatttgtacctgtaaaaccagaatgactccttcaggcattttttctcctgggtggttgcattcatgggctgaagctggctcttctgaagattgcaatgatatttaaggttaagggcttgccaggtaacaccttgaatgactcaaggctctgaggccaggctgcgtccatttgaaggaaggaagcatctttttctgattcatgcaaaggcatcttatggactaatggtcatcctagaaagtcatcactagtacaaggatcttttggaaaagtgagattggagaaggttgagtatgaaagtgatgtattagaaaggtgaatatgggatgtgagatcctagtcattagcgtttggagggggccttggaggtttgttagatcaaagctttcattgtgcaaatgaaatggcccagtgaggttaaaagagggaaggtcacacaaattccatgaaaaccataagtacaaggtttgaggaaaataattttaggacaaataaaagaagtgctgattttcattgcacttctaacagttttatagaagtgtctgtacctaaagtgttgtacatgttaaaatgtaaatatggtcaagaagattgtaggtgaaatcgaagatgatatgttgctagggcccagccctagcaacgtatcatcttttgaggagtgttcctcatactttgagattggttttatagagggctgttccttatactttgcgattggttttatagagggcaactctgttcacccacaaaagtctcttgatgccattgctggccagaacttgggtgggagaatgggaactgttcagcagagcaggtgaacaggtggtcctgccatcccagtggcaggggccccttcctttctcccgccactcccggaggaatgaccctgcatcttatgcactctctccgattccccaaatcccctaggtcccactgcttgggtttggggagtggggcacatctctgctgagagccagcccatcaagctgtctgggtctcatggtggcatatctttgttccaactcaatatgggcattttaatctttatttatttttaaaatttaattttattgaattcagctttaatattattgaattcagctacaagggagatagaatagggtgattgatagttaagagcatgggtcttaaagtcagaaagacaaaggctccaagtccagttaccaacttctgtaattctgtaattctggggggcggacttacctgtctgagtcttagtttcttcaactataaaatggatgtcccagtactgcctccctgccaaggttgtctgagtgagtcctcaataaaagctggtagtgagattaatagcacttgatggcaaagtttgtacccagtcatgggtaggggaattgcatctgccatccagtggctgaggtcaagtgatgacaccccaaactataggatcctggcagctacagcaggcattgctgcttccctttcggaaatcccaattgttgaggccctggctgaagccctgtcgagcccttggtgaccccactaccatttcctttatggttggcttactctgctttcttttgcaatgaatatagtttaaaatttctttatgagtgttctcctatttgctgccttagcctgtcacccactatgctgagctccccacccctcgtgatgccactcagcacctttatttgtgatgtggggtattctgggaaactcttcacaggcaactcagggagcctggccctccatcttatctcttaggaaatcctcaggtgtcccagggtttggcaccagagaagtgctgtagaccctgttttccagaaagctccgtgccttcacgtgtggtgagggagtggctgcccagagcaggcgaggaggcactgggggttgcacccatgttttattatgatgggggcttcagaagccagatgtctgcagctacttggagcaagcctgggtcttccttagactgcagttttaggacttaaggaaggagctgggctgctgccacatgctcgtgcttgtgtgtttaatttgtttattggtggattttctaccctgcctcacatcagaaagggcttgaggcccaggggtataataggtgaaactttttctcttgaacagttttgccttttcctaacttctccgagcctctgatctctaggagaggctagtcagcccttggtttaggggctctcccttgctgagtagggttttggctttgttggggctgtccaagggctccaggttccacttttagctgcacagctgacttgtctcttgtccccagatgctctcctggcccgtgagggccatagcatctcaactcatttaatctggtagcactgaggtgggcagtgtttctgagtgttttgtgtgaacccatgaagagaaaatgttagaactaggctttatgcccatggagtgattcttctacagtttcttagttctattaaattttaaaaatatcttattgcttccacagaagagaaatttttagaatatgggaagagcgaatataacattttgttcaatattaaaagttaatttaagacagaaccagaggccaagacaagtgtcttctcttttcttcatttggtgatataattgaccctttgtacctgcgtacaacttaatattcattcagcagaggctaattatgggatgcgtagatgccacatggttaaggtgaagatgcagatttctgtgtgagctgcttaattctgacggttataacttgtccataaaatttgctatggattgtaacaagtggaatattaactcggaatatggggaggtcaggagtatctcccatctgcttcctttctgaagggatcctagctgaactgagtggggggtatgttgtgcacagttaatatgttgttgacacttgaacaactcaagggttacggcccccctgcacagttgaaaatctgcgtataacttttgagtaccccaaaatgtaactacttaacctatcatcaactagagcctactgataacatcaacagttgattacacatgctttatatatgtattatatactgcatttttacaataaagtaagctagacaaaagaaaatgttaagaaaatcatggctgagtgcagtagctcatgcttgtaaacccagtactttggaaggccaaggcgggcagatggactgagctcagaagttcgagacagcctggataacatggtgaaaccctgtctttacaaaaaataaaaaaaaaaaaattagcctgggcatggtggctcatgcctgtagtcccagctactcaggatactgaggtgggaggatgacttgaacccaggatgcagaggttacattgaggcaagatcatgccactgcactcaagcctgggtgacagagcaagaccttgtctcaaaaaaaaaaaaaaaaaggaaaatcataaggaagagaaaatatatttactattctttaagtggaagtggatcatcataaaggacttcagacttgttatcttcacattgagtgggctgatgagaaggaagaagagggatggttttgctgtctcaggggtgcagaggtggaagaaaatccacatataagtggacccacatggtttacacttgtgttgttcaaggtttgactgtacgttctgagcccaaaattggaacacatgccctaaggccctgtcctggatcattttatatatgtgtatggtcaggcttacaaagatagaaaaatggaattccattttcttacatatttctacaaattattttggtcaaaatctagaaaatacataaaactgaggtctcctggaaaagccagaatttatctctgggattgggataattggctattaggaaaggggtctaccttgttggcctgtggtcttgacttttccttctggaactgagaatatgtgaatggctcgtggaactgcacggaacccagtggtgggcagtatctttgtaaacaaaatgaggttggctttcaatggccagggaatgaatgtggaaccaaattgcagtttgtagaaacagagctgggctcagacatttaaattaaacgtatatttctatttgcacttccattttgttcggtaatagtgttggatatgggaaatcttgtctttgtttatatttgagggaactgcagccttcatttcctaaacggaagatcctgtggcattcctgcaatggaagctcaccagatgatcagaaaagggagagatggcgaagtaacttgtctctggttaccctcccattgtggaaattaatatctgacccaattctgtttgcccagtgagtttatggcttgctaagtggctgttgtaatgatccgtcaactgttgcaacagcattttctaacaattttattttacagttctgaagttttagtccataaattttttgaacttaaggctttgagttggaggagccatgtggttctaggggggaaaaaagtgccagatttattctttatgtctgtgagctgtgccttccccccattcttttccctctttacatgccacccctctgatattttctacttgaaaaaaaaattcatactaaagtgcttgtctttgtataatgctactcatagaatatttgtatgaaaaaagagtcaggagatgcgatgttcaacccaagtgcatgaattatgattataaagtttccatttaaaaatgaaggctgttggaacccttacgtgttgctgatggaaatataaaatggtgtagccactgtacaaagcactgtggtagtttctcaaaaaattaaacatagatttattgtgtggtcagcagttctacttctggttatatacatgagagatttggaggcagggacttgaacagacatgtgtatacccacatacattgcagcattattcacaatagccaaaaggtggaaacaacccaaatgtccattgatacacgaatggataaacaaaatgtgatagacatatgattaaatagtattcagccttgaaaaggaaggcaattccgatagatgctacaatgtggatggaccttgaagacgtgctaagtgaaatcagcctgttacaaaaggagattatggctcctcctatatgaggttcctagagcagtcaaatccatagagctccccaccccttatgacatcactcagcaactttatttattaggtcacaagggggtggggagctctgtgacaaaaagagctctgtgacagaaagagtggcgattttatgttatggatattttaccactgtaaaaacataataggctgggcatggtagctcacgtctataatcccagccctttgggaggctgaagtgggcagatcacttgaggtcaggagttcgagaccagcatggccaacacggagaaaccctgtctctactaaaaagtaaagaaattagctgggtgtggtggcgcacgcctgtaatcccagctactcaggaggctgagggatgagaattgcttgagcctgggaggcaggggttgtagtgagccgaattggcaccactgcactccagcctgggcaacagagtgagattctgtctgaaacaacaacagcagcagcaacaacaacaacaacaaacaacaacaacaacaacaaacaacaacaacaacaaaacataataaatgaaggctgatgggaagccttatgtgggtggggttaatgtctctcttaagccagacaggtgagaactgccctctagatgtcctttgaaaatatagcactgcccaggctggtctgtcaatattagccagctaacgtggtccttaggtcccaggccacttcccaggtaaggggctccatccccgtgctgacctgcattttccttctaggtggggatttcaggtctagaagcagctcccacctgaaacctatgttcttggttgctttatgtgataattattgtgttctattttaagccactcctctgagtttggtaaccgtctgggattctgttttgttagccctctctgtgagacacaataaaagaacagcaagacctcatgtaggtggtgaggggccagaaggctcggctggctgggtttggagacacagtccctcctgtgcagcaggagttttcattccctataggtgaaggctgagaaaagacaaggctttgaataaaataaaatacatatttttctccctgctctggaaatgcgcttggctccaacacagcaggtggccgaggaactcaatctgtggaaggcatcagtgctttcagtgcaatcaaagttaagtgcagaaatttaattaaacggcatcaaggatggcagaaactttgtaaagctgcaatgcattgtcaaattcaacaattatttcaaggaacacaatccacagatggtgtctaattgataaattaaggttctgcttctctaatgggcttgtgtttaagcccgttttccacccatacaataaccatcacctccaggatgccccctttcccctctccagcttggacatcgctgcaagaagaaagcaacccagctcccccagatgacattcgggaagcctagggttgggtcctgaatgtttagtgggaaagacctccagctccttttcctgtgatcccaagctcccttttgggattgagtcttgtcctaaaaacagaaacaataggatttcttcgggcctgtgtgtccttttctgctctgctaacccggatgtgttgctcagagatggctgggttatttatttattcattttttttttctttttcctttttagcattgctgactttcttcctccatggcacaggatttttgcccaaaacaaaagtctcaatttatttgttctttaaaaaaataaaaaccacactgaacaaaaacctctgtttttcagaacttgcttcctgtctgttaatagtagatacccagctaacttacttttatttcgtaagaaaatatttgcgatctccaaacatccagtcatgtgcagagaaatgtatcctgtgttgagatttcatttgaaaggaaacctgaagatcttgggtgtttaccagaacttcattttgcagatgagaaaactgaggcacaatggttttttatataccttgctttgggactagttctgtgaaacatgatgtttctaaagctggaggagaggcagttgagcacatctgggctacctactttaaatggttatttcatccattcgtttgttctaccaacaaatatgcattaggtaccttagcttttctaaatgctaaggggaagttcagtggtgaaggaagacactattcctgcctgcgtggagctcacaggaaagtgtggggaacagatactgcacggatcctatgagtagctgtatcagtacaagttgggatgggtgttctgcaggcagggtagagggtgacctgggagtgtctactgggagacattaggagggtttctctgagaaatgacttagcattaggagggatgggaggagccttcttggcagaggggatagtgagctcacggctcagtgtaccagaagacccaatagaaggccatgtgggggaggagatagtgtgagaaaggctggcaatgagcaaacagagaatgttgtcctgggagatgagcttccacatattgtgcacttactggacagtatacctggtgctgttcagaaccttatacagcccatcttgtctaacccttactttattcctagatgtatctcagtatcttctacagattgtggcacatagtagagtctcagtaaatgaatcttcccaatgttgactattttttttgagacagagtctcgctctgtcacccaggctggatgcagtgggtgtgatatcgactcactgcaacttctgcctcccccggatcaagggagcctcccacctcaacctcccgaatagctgggaccaccgttgtgtaccatgccaggctattttcttgtattcttagtagagacagggtcttgccgtgttgcccaggctagtcttgagctcctgagctcaagcagccccacccgtttcggcctcccaaagtgctgggattacaagcatgagccaccatgcccagcgttggctattattatcccaacttttcagttggggaagttgaggtggactgaaggtaaatctgctggccccaggtccgagaccaccggtggggtgggtttctgtgctggacagcatctgtctcccccagcctgggcccttctcacgcctcttccctcccctgaagggatcacacgtttgaatgacttggagacttggagacacattctgtaattcataactctgaccacatgctgctcttaaatttccaccccgtgaaggaaagaagaaatgagagacaacccctaactttttatttttacacatatagtagaggtggagagggccaagtttacaacagaacctttgcaaaagcagcagccagggctcaggacctcactgggtacccttggccttgtctttgctccctacgggttgtcctggaacaggaaagcaaaggggaggagcgaagaggtggggacagccaaggaacagatcatatttacttatttgtttgtttatttctaacgagtagctgtggggaatgccactgcagaaccctttctaattgccttttatttatttatttttgccatagcgtgggtggcttttgaaattgcacgtaatttacggaggcgaggatcctgtgcctgggataccagatgatgtggctgaatggctgttggctgtttatttgctagtctgtcgttaccaacacagtattcttgagttcagaggcacaacagtgtttgatccccctcctctctcctatctaaatatatccaactagtcaatcagacttggcagccgtcagggctgtggctgtcagattgagtttgccttggctcctctgaactattggcttgttttccaagctcgaaagtgtatacaaatagtgatatctaaattagacttgcaaacacacacccaggtaggggccctgaaggggaagaatgaggcagcattttggtatgaaaatgacatttccttctcctccactatctgttggagagcacagacgaagctacactgaggggaatggcttcacgcttggtgaacaagatgcgtgggtgtgtttttctgaattgtgattaaaatgtttttttttccttcaaattttaagttgtatcaggagatacaagtggaatattaactcagtagatgggggaggtctggagtgtctcccatctgcttcccttctgaagggatctcagctgaactgaatgaggtatatgttgtgagcagttaatatacggttggtccttgtgatgttgttgtcttggctgaggattcaggaagactcttgggccttggagaggcctttggttccatggcctgccccattgggccggaacagcccctttcctcaaagctgcctcaggcttttcctgtagcttaggaacagcagaccgagctcctgggcccctccctggaggcttattaagggggatcagtggaaagaaaatcagagcatcttaaatccctacctgcaaggtacccttaattctccagggagaaaccttttataaataaatgtcatgagtgctcatcccccgagttgaagcttatctgcagagatgcttcactccgggagagagggttggagttgccattgtgaaggcctgtgtgtgtagaggtaccatgctgccaccaggccatccctcttacagctgtgtggcatcctggaggcctgggtaggagacggagggtgccgcaagttctcttccagtgatggggagccacaggtggttttgtagggttcctgggtcttaggtggttatcaaaagcatttcacagacatatgtaagataaagaccctgtcctcaagcagctaaatgaatgaactagaacagtggtacccaaattgtggttcgggacccctgggcattcctgataacctttcaaagagtctgtgacgaagtttcttaaataataattttaagactttgtgtttttcattctcatccttttatgaatatacagtagaatttttcataggctacatgacctctgttgacatcatagttctggtggctaatggaatatgtgtatttctgtgtttaaaaatgtctcaattttggctgagcgtggtggctcatgcactttgggaggctcccagcactttgggaggctgaggcgggcggattgcttggggtcaggagtttgagagcagcctggccaaaatggcaaaacaccgtctctactaaaaatacaaaaattagctggtcatggtggtgggcgcctgtaatcccagctactcgggagactgaggcaggagaacccttgaacccaggaggcagaggttgtagtgagcagagatctcaccactgtgctcccacctgggtgacggagtgagactgtgactccaaaaaaacaaaaacaaaaaagtctcaattttgatttctaatatgataaatattgagagatataacacacataattctctttggtggtcctcatgttttaagagggaaaaggtgtcatgacatcaaagattttcagaaccgcagaattagaatatcggcagataagtggcaagttgaagttatatgctaggtactaaggtaggcagagctctaggggtagataacaggtgcttgtgagtgagctggagaggagattgtcagggaaggctttcaagacaagtggttttcttacctcggttttgaaggatgaatagaagtttaccagagagacaaggaaggaaaaagcattctagaaggaaggaacggcatgcctgaaatatcagtgtgtcagcttttcctccccagtctgtgggggtcagaaatagggtcaccctggcctcaccatgagatttttttctactgggaatttccaaaataggctgcatctcagagtcatttggtgaggtttatggaaatactggtgaagctagttcccaggtgtgctttgctctactgatggttggtagcattgtttacctctggtggtgggaatgacagggtgctgtttgtaccattttcggttcttttgttgagagtgacgtcacagttgtcctgcagcaagccagggttatgccaccctgtcagctatgccagaatggcagcaggtgtcactggacacataccattccttctttacaccatctatcaacctacagtggggaaaggggcaagaatacagcataatgagaggggcagccagttgtagctcggggaccttggattctaagcagcatgaccttgggaagggtcttgagtctttgagcctgtttgtcctcttaggaataaagcaggttggacagaccttacttaataggcatgcttaaatctgccagggaaagggaccctcctgttgatgaataattcattctggttttgttcctagaaagtattccatggggcacacactttctcagctgctcttggttttgcaaaggaagatactgacatgttcagattaagaaatcgtaaagcttctgaactactaaggaagggaaaagaggggcccagggcccacatgtgtgccaggtgctgatctgagggttttttgtgactcatctcatttaatggtcacgctgttcctgtgagtaaaagctgtcatcccattttatagatgaagaaacagaggcacagagaggttaccttaatttgcccaaggtcacacagaatcctggtgttcaggcctcatgccttctgttcttaactccatatcctgtgtccctgggaaaggaaggggccatagtctggagtggtttccaggagaaaagagccagagtaatctctgctcttcatttcttaacaagaatagaagacagaataaagggcacagggataaaggattgttaaccagactggcaaatcagtagactaattaaaaatcaaacaccttaaaacactgtcgctgggttaattgtaaaccaacaatgaaacgttaaaatttgcccagcccatgagtttgaatgattaactgagtgagttaatttcaagccattggtttgagtagccgtgaaagctgaggttagtggaaggggaatctgtgtgttctttcctgcccaggcctgccctggtgcctaaggtcttgtgattgttgctgctgtttgcgtttttaatcgaaatatcttaaacatttaggcagaacctcacaaatgcagctagattgtggaaaaggacagtgtgaatcagcaaagagtaggattacgtatatctttccaaatagaagaaatgccattctgttttgcaatatcacagagtcctggtagcaagaaagggccctttggaaaggccttttgccttccagtgtttgacccaaggctgctgtcccatctgtggcctctgttgctctctcatgttcttttctgcccagagaccaggtctgggggtgttatcaggagttagtcctaagactggaatgagactcctgggattcaatgatggccagttgaccacaagatgtttctgttaggttttaagttgagattctgctacgcctgctttgatggctaggtaacactcctcagcaccaggtgatggatttaacctctgtgagctgtgtttctaacctgactgggcccagggatcatgctgggaaagttatggaccctttacccagagacttgcgctacaacacagccacatacagctttgcactgagggtcaggatgcacagatccctggtgctcagacatgaatggccttattagagtgaagaaaccctgtgttgaagtcaccaaacagctggactttaaatgttaatgttaatatttcactgtgacttatatagcattttattttttccagagttccttacaagacaatctgatttgatccgcaggagaatcctgtaaggtcaattatatagtcgctcttttatatatgacgcatgcagtaggctcagtatcttccctgagtgttgctgttttcttgttaatttgctaaatgggcttttaaaaaggagataaatgtaaatttcagccccgtaaaatagatacatctcaaatgctcgtgactcaaattaattaattaaaaaacagaataaaacaccactccagccacaaaacatggcaaggttgtaatgtttattccattcagccagttgatggggtaaaattacgagattggtctgtgataaaaatgtttttaactccaacttagacgtttacagaaaggagagacttgggcagtttgtttatttagaacattgattactgcttctgccatgttcctccaatcacaaacacttgggaaaattttggaaaactgcaagaactaagtaaaaatccccccaacgccactatttaccattcagagataactgctatgaacatttcggtacatttttttctgtcctttttcatggcaaaaaaaaaaaagggcaaaaaattatatagagacacaggtatacacacacacacacacacacaaatcattggctaacctgcctttataactttatcatattttcctcattcactgtttttatgttgtggtttttattgtctatgtggtgttgtgacttacaattatactttatttgaccaaagcctgttattgaatagttagctggttagtgatttattattattattataagtaacattgtggaatatccttgtacataaccccttagcaacatctctgatcacttccttaatatgtttacctagaagtggaattttggggttaaaggctatggatattttgaaggagattttacatataaatatatatgaaaaatatataaaggagcttatatatatgagatatataatctcctttacaatatcaaaaaatttgtaatatatatacttatatataatctcttaaaattttttttatcttacattggccctcccgataaggagaatggtactattttctaacctcaccaaaagtttgagagattaacttaatttaaaaaaaattactgtttttgtaaaaatgatgtgtttatggtaaacatttttatatgtgctgaaggggaaggcttaatttaaaaagattggggtttcttggatcaacttgaattgcttattttaaacagccctcttcagtgtagtttggcaaagctctctctttcgggtttatttgtttacttacctacttatcttcaacacactgacctacccacctgtgtatcttatttggttaacatttatccaagtttgaagatggaaatagttttcctctgaatcagaactttcagtgtaactgttccaagaaaccgccaccacagatgtgggaagagggaagagaatgaggaagattcctgctgtctttttaccgcttgggtttacaaatgtggcaaatttggaaaatgtcaaaaagtaggaaaaataaaatgaaacctgagatctcaccacacagaaataattatagtcaacatattgatatgttttctctttttggaggaaaaaagttacagatgaacagaaatttgaaaacaagctgtgcctattttctgtttcttttattacacattttattatcaatgaatactttctgctgtaaaaaatataaatgatacagaaaccaatagtagtgttcccctttctagaagaaactataaaagggtgtactgttcatcgcccctattcacgctttaaaggagatgtccagctccagttgaaaatgaagttttcttacctggcaatctggtgtttctgaatgtgatttgaaatccgccaccccaatgagaatgaggacagttttgtttttttttcctgccaagagggatcgatcgtattgattaattgactgcaaaaataaattcagaattatgaaaataaagggcatctggatttagaattaccaaatatggctgggcacaggggctcacgactgtaatcccgacactttatgaagccaaggcaggtggatcaccttaggtcaggagttcaagaccagcctggccaacatagtggtagagacatatctgtctctgccaaaaaatacaaaaattagctgggcgtggtggtgtgtgtctgtagtcccagccacttgggaggctgaggcacgcttgaacccaggagacggaggttgcagtgagctgagattgcgccactgcactccagcctgtcaaaaaaaaaaaatcaccaaatattaggtgtgttaagatcctgggagatcaaatttcaccctctcattttacagataagaaaactgaggcccaacaaacattagtaattgcctcaccccaggtcaatcagccagttaggaacaaaacagatttcaggttctagtttgtgtccttttttctttttaaatgaagatattgatctattttttaaaaacaagaacaaaggccgtgtgttagtctagtttcagttgcagagagctgaatccactcccatctggtttaagcagaaaggaatttgtttgagggcattaaaatgcttccagaaatcatcaggagatacacggaaacctctaggttgtgcttttgggaacagccctcagagctatgcagcagatctgggtcttcaaatacctactgtctcttctgtcatctggaagtccccaccaaattgggaagatggtgctacagctgccaggttcagaaccacagccgcactgtccccatccgaaggcctccatggctgccactgtcctgctgtgatctccagcaaaataggttctccatgactagtcagtagagacagaggatattgctgcagaataacctaacacctccctggccatgttgccaggggaaatagttaaagtacagaatatactactttccctttcatacctagctgcaagggaacctggaatattactccttaattttccagatcctgcataacagaaaggcttatggcgaggaggttggactggatgatggggaccgatttaccatgtctacttagtaaacagatcaaatgataagaaatagacttcagttctgtgttatggccatgcaaggtagactggcagagaagcaaaaaacaaaaacaaaaaagcagccagacaactagagaattgtccagaatttaagacagacaaagacagaagctatatgcagaaacatagcgtcaatagggtggcagcactacattgtactgttttaggatatatcatttgaagtcctgttgcatttttgcaaccctaggcataagtggtatgtggtagtttatacttaatgtgactgaaattcaattcaaatccaattccaacttgagtattgaagtttccctttctagcccttgaacttgtatcctgatatttgtccctaaaactttaacttcctcaatatttttttcctgcccttttcctggttttatttaccttatactattgaggaacctacattttccctcaaaatccaaaatttaaaaagatgcttgacaggaacagtggctcacgcctgtaatcccagcactttgggaggctgaggcaggtggatcacctgaggtcaggagttcgagaccagcctggccaacatagtgaaaccccatctctactaatgatacaaaaaattagctgggcatggtggtgcagcgcctgtaatcccagctactcgggaggttgaggcaggagaattgcttgaacccaggaggcagaggttgcagtaagtcgagattatgccactgcactccaacctgggcggtagagtgagacttcatctcataaataaaaataaataaataaatgcttatctttgatctagcaaggagaccacttagcatttattccatgtccagttgacatttgggatgtgctttaggcaagatggcagccagagcactagtcttgcctgctatgggaatgatcatcttggtttccatctcttcagcatctctagtgagacttcaggacatccctgaacattccccatacagatcgaacatcattatttgctcttcctggtcattgccagcttgttggtgtggcggctgagtgcttggtgttcacacagctctgagtttagatttgcctgggttaatgcagcatctttactaaatggtgaggcttatccacaaacatccagcatgactacattgaaaatcagacttatggaagaagaaggaagagagcactagatagagggtcaaaaatggagcgagagatggcacaaagtgtagtgatcagcaaatttaagcctctgacaagcggtggtcagcagccttcccaggcctctagctagtcaagtaggtcagccgcacttcccccgtggctgtttgtaaaacattctgctttgtggtatagagccaggagccgaggagaggaaactcaagaggcaaagatgcagttctgtcttcagaggcatttattttcctattcaggtgggtgaagccttgccaggaaacaatttctgagcgagtagaaatggtgatggaatacggaggattgtatgccaggcagcatggaagccatgggatcacggcgtggggagtggggctgtgaagccagccagagcttcttggaatagttgagggaggaggaggaggagatgatgatgtaacattatcacattcttctacttaagaattcaataatgacttcaggcagtgttattaaggcctgcccagcaagaatggaggcacagaggccactctgagtgaacatatttgggggactctgagatacagccatttcggggaatggggagtggtgttgagtgcaaataggagataaatttagagataaaggatgacgagactcccctgcccccatccttctcctttcattcgcgttgcccttacaggtagatgtctgttcctgtagccaaggcaccccaggccgcgttagccgatgctcactctgaccgcccaggagcagcaggctgagtcagcctgtcccgcctttgaacttgtgtgcagctgcttgctttaattaggtgatatgtgggttcccttatcttcctgagagaagatttctcgctttaggtgatcggctattgacgccaatgtgggattagagttccttctctccagtttcccctcaggccctgttacaggatgtctgagataggaaaatcacatgtttgaacaagtggtgggtgagttgcttggcaggtcgtcaagactgatacctccagtgccctttcaggttggcaaagcacattcacatagaatctgatttgatccctggagaaaaggtatacaatactttggaaatgtcccatttcatagatgaggaaacgaaggctcaaagggatgaagagtcttgctcagggccaagtagccagcagacagcaggtctgggaaccctatcccggtctggatccaatttattgccctctccttcagtgcaagctggtgtccacttggacttggttttcattgctcaaatcccttctcgcctaggtagggagcccctgaagggcacacagtcaaatgggccaagcacggcaggtgagaccctgacttctcatgaccccgtgttctggagttggagaaacttctgctagattgactggagatctgggttttcggttgtgatttttccattctcctaaaggtagacagcagaaataaaaatcctgaggcccaccgttgtcttccttacccctttgaagagttttctgtttatgagcagctgattggctcaaacttagcctttcagaaatagcgtcttcctcttttgggaaaatatggcatctcagttgctttctggacttgagaatatctgccctttgcctttgggcaacatttgctgccaagacctgcatgtcaataagatcccaccttcccctgggttcctcccacccccgacccaggaaaggggaagaacatggtcattctgggtgtcacgttgacctgcaagtgccttttttttttttttttgagacggagtctcgctctgtcccccaggctggagggcagtggcgcgatctcggctcactgcaagctccgcctcctgggttcatgccattctcctgcctcagcctcccaagtagctgggactacaggcgcccgccaccacgcccagctaattttttgtatttttagtagagacgaggtttcactgtgtttaccaggatggtctcgatctcctgaccttgtgatctgcccaccttggcctcccaaagtgctgggaccacaggcgtgagccaccgtgcccggcccacaaatacttttttaacctacttgggatagtcagttcagaaggaaggaatgagccaagcctgacttccctcaggtacgagtctgctaatctttaactctgacttgaatcagggcatccacttctttccttagatatccttctgccctgttacatcacctcatgtgttgcatcactgtggctggctccacagttggaattctgtgtcggggaaaggacagggaatttggggctctgcccaggtgagcagggattctccacagttcagtccagcaagtgtttttggaagggaggcctcctgtgcttagagcttcatgccccttcaccttctcagtgacctgccctatggaagtcatcatctttacaacaaggacttctgatatatttgactatatttccctggattctgcaaatggcagaatttggaaagacatgcattcatttgttcccccttgctcttcattactttaaaaaaaaaagctaatttgttttgatgagtagtagaggagaaggaggatagaactagatagaacctgtcttccactcgctccatcccacttcagaagtgaaggcatggccaggcacagtggctcacgcctgtaatcccagcattttgggaagccaaggcgggtggatcacgaggtcaggagatcaagaccatcctggccaacatggtgaaaccccgtctctactaaaaatacaaaaaattagccaggcgtggtggtgtgcacctgtagtcccagctactcgggaggctgaggcaggagaacggcgtgaacctgggaggcagagcttgcagtgaaccgagattgcaccactgcactccagcctgggtgacagagcgagacatcatctcaaaaaaaaaaaaaagaaaaaaaaagtgaaggcattatggacattcttttttttgaggcggagttttgctctgtcgtgtcccgggctggagtgcaatggcgcacacaatcttggttcactgtagcctcagcctcctgagtatctgggattacaggcatgtacctccatgtccggctaaattttgttttttgtttttattattttttttgagatagagtctcactctgttgcccaggttggagtgcagtgatgtaatctcggctcactgcaacctccgcctcccgggttgaagcaattctcctgcctcagcctcccgagtagctgggattacaggcgaacgccaccacacccagctaatttttctatttttagtagaggtggagcttcaccatgttggccaggctggtgtcgatctcctgacctagtgatctgcctgccttggcctcccaaagtgctgggattacaggcgttagccactgtgcccggccaatttttgtatttttagtagaggcagggtttctccgtattagccaggctggtctcaaactcctggcctcaagccatccgcctgcctcagcctcctaaagtgctaggattacaggagtgagccaccatgcccggcccatttcttgtttatcttcttaatttcttagtttgcccaagtttaggggtgttggcataccaggctttgagtgtggtccactggggagaaggttccagagtgaaccagccacccatgaggaaggacttgccccaaactgaattatccctctgtgactctgcacccaatgtggaatgactgggacagtaaatgagtggaagctgcattcttctcacagcgacatgggcccaaaatgctacctgtgctaagtggctgagtttgtgttatatgtgagccatcagcctgcgtgtggggtctgcagtcctctgacagggttcagttgcctacctgggtctatctcgcttttgctcttttgcgtgtgttctgcagaccgaccagaggttgttatttcactctccatcccctcatcaaactcacccaccccagacccttcaggaacaaaaccctgacatcctccctcatgcatttgttgtgatctcgtgtggccctgctctcagctcaccccacttctcttggctgccaggtttccgtgttttgagaaaaacctaaaaaaactaccacctgcctctactactcgatctactttccccaaacccttctctgagtcagggttgagttttccctcccgcccaccctgggctgggggagatgtggtctctcactggtactttatggaagggtgtctttattcaatttgactgttgctattatgtggcgaagccttcaataaaagtcgtgatttatgagatgtgtgtggctgtggttgttttttcgttttctttcttctttttttttttttttgctttgtcatctatcagggagagaaaagccaggcctgatactttcttggcatatcctgtgttcagttaagaatgtcagctgtcggccatcaggaagttacttctcggattggcttctcctcccttttacctctcaccacagtcccctcttgaaacaggcagaggcccctgctgtcctgcaggctggcgataaggggcctgctggatgctgtggggagagaagtggggcccctggagtggcccctcgccctcttaaccctcctcagtggctatgcgttcagcacccggtcagctcttgattgtttaataggaagaggcaggcagtgctcttccaggggtttccagagttttctttgttctcgaatacggtgactccccacccctcccaacttctctttgttttttggcctggccactttagaaatcctttcttttctttcttttttttgttttccttttcctttttcttttctgcaaagtatgtgcatgttagataaaggctcttgaatagaaggcctagcatattgggtattggctgctgaaaataggctaattggagatagaagcaagttgtcacagaggtgccgtgctagggggtgggaggaggatgaaccccagccaatgccaggatgactgtttccacctctcccctcttcccgctcttattattagctgtttgctgaaacgcacccatgtctttgtggagccacccacaatagcattaaccacgttgtgccctgcatcttaagcacctggttaaggccctgttctacgtctggaattggtccatgctgagcccccagagcgtgcgtaaatcaagtctttaacccacagcgggcggcctgggcaggaccgtggaaggtaggcctgctgaacttgagtggagtgtgtgcccctgggtttctaagcggcggcttctgaggcagagccacccagactttcattttggttagtagcggtgcttgtcagcaagttagaaacttggaaggcccccatcgttctggcctcctaacagggagagtgaagcgggggcaagctgggggacctgtaagtgcccactgggatttattcaaagtgaggtctttagacagtccttggtgaaatgtgctggactaaagggttagtccttcagccccctacccccaaacaaccaagtggatgtgggttttgccttctagataccaacagtctaagagggcagggggattctgcttttgtgagcacctgggtgctttgaatttggacatctgttactcttccagcaccaagggtaaagtagttggctagtcctatacctgacaccaccaggtgtgtaccttctctcacttctgtgtgtgctgatgtccctgttacccatggagatcttggcatcgagttatccttctggctttctctctggtggtctgtctgtgctcccccatccaggttctcagggggtcttcagcagtcctggcctggaattctggctcccctgacccccatcttacacatacccccagctcccacaccagtggctcttccttggcctgacctccctttcttttgcctggaaaaccctacccatttacttctcaattttatttttattttgagactgggtcttactctgttgcccaggctggagggcagtggcatgatcatggctcactgcagcctcaacctcctgaactcaaatgatcctcccacctcagcctccctagtagctgggactacaggtgtaccaccacacctggctaatttttgtattttttttagagacagggtttcaccatgttgcccaggctggtcttgaactcctggattcaagcgatctgcctgtctcggcctcccagagtgcggggattataggcgtgagccaccgtgcctggccaaacccacccatttttaaatggctcatctcaaatatctccccttccttgaagcctcttctgctttcttccctccccaaggcagtgaccctccctcctcctagccctatggcctctgctggttcttttagaacctgttaccttattgttccccctggtccttcttgttcctgtcctgtatgccccagtagcaggttacatattgaggacaagactgtcggtgtcactgctgtcctatagaactttctgtgatggaggaaatgctcatcttaatgcacgtgggcatggagcacttgaaatgtggctagggtgaccatgaactgaattgctaatggcacttcattttaattaatttacaatttaacttcagtagccatgtgtggctggtgctattctgtgtgcatcttgcttatctttgtattttcagaggccctggcactgtattctgctcacaagaaaaggcttgagaaatcacttaggtgtagagtcgtgtgagcttatgcattctttgcctattttccacgcaatttgatttttaagttaaattcaatagactatatacttgagcaccaccagtgctttgggggatgcaaagatgaaaagacatggtctctgccttcaaggaacttaaacctaacgggtaaatacttagtgataataggaagcagaatgaaatgaaatgctactcttcaggaatagtttacatcctgtgcaggtgtagagaaaacaatagtgtatgtgactgaggggtgttggggagatgctttaggatggtcattcattcattcagtaaatatttattgcatgtcactgaatggcccaggtactgggaatacatctgtggacaaaacagacaaaattcctgaccagaaagcttactttctggtaggagggggacaggtgagaaataaaacaagcaaattatagaatgtgctagaagatgagaggctgggagaaggtctagggagtgctgaggtgtgggcggaattgaagttttcaatggagtagttaaggaaggcctagtggagatggtgacatttgagcacagacatttggaccaagacttgagggtctgagaatcgtgataggaggtaaagacaggtgggaggatattcctgggtgagggaacagcttgaatgaagatctggggtgtggaaatgtgagcagtggtcagagacatgtggttggagcatagagggtagacagaacaggaagatgaagcttcaatgttagttgggaaactgataacaaagggctagaaaaccctgctggcaatttttgatggctctgcagataccctgcctccctgattaacatattaccccctccacccacgaggacagtggtcccagttattacttctgttcttcccatagggatttattccaagtagctgctcagaaattgtgtttattaaaggacagttaaaactaagccaaatgtcttacgatgaaattttgagaaagcaaaagtctaataagatcaggtctctcctttgggtaattgtaccattggctcttatgctatttctaggcatctctttgtgcagactgagtactctgctatgtcccaggtgtctcagtccctgtgtttgaacatgttcatttgccctggattcactttgggacacagagaaggtttgaggaagaaagggcctgtgaacagcaggaacagggtggaggaccaaggaggcttgtagaacagggtctgtgtccagggagaggaatgcttcatttcccagcaaggacagagacccagagacttaatggctggacaggaaatgagttgttctgagccacagatgccacttggagaacaactatacaagattatcatagttttagatgtaccctgagttttaagaattcagattttgcctaggaagaggaggagggcctttggcaagggcaagaaaggcctcttaaaaatacatcgcccatcagcctgttttaaggtggctgtttggaactactgacatttacaatgataatagatataaaaaccatttctaggctgggtgcggtggctcatgcctgtaatcccagcactttgggaggccaaggcgggtggatcacctgaggtcaggagttcgagaccagcctggccaacatggtgaaaccctgtctctactaaaaatacaaaaaagaattagtgaggcatggcagtgcatgcctgtcatcccagctacttgggaggctgaggcaggagaatcgcttgaacccaggaggcggaggttgcagtgacccaagattgcatcattgcactccagcttgggcaacagagcaagactccgtctaaaaaaaataaaataataaaatagaaatcatttctacccagaaaaaactgacattttagactcctgcctttctaaaggcagagttgaccactacaagcatatggtggtgtgccttgggggtggttatcatatttatggataaatctttcaatgccatcagcagcgaggtttacccccaatgaatacaactaaccagagactgccaggtcactccacggcttggtgcacccatgggcctgtctgggagacttgctcacgtggcagctcagagtttgctgatagctgcgtgtagactgctggcccagcaagcacccagatccatcatgggaagtgtgtggctgagatctggatccagtgaaactgaaaactgactcttcatcctactaaacatctttgtgatattgaacactgttgacccttcctttctatttgaaatggcctgacttctgtgttatagttattgttgctgtggaacaaattaccctcaaatttagcagcttcaggtaacaattttattatgctcatggagtctcaggtcagaaatttggatggggcatagcagggacagctggtttctttttcacctggtgtaggacctcagctgggaagacttgaaatcaaggggagacatgatggcaaggggctggaattatctgaaggcttgttcactcatatgtctggctcctgaactgggatgattcaaagaatggagctcctacatgtggtctgtctatatggttgggcttccttacaatatggtggcttcagaggagtgggacttcttgcttggtggctcagggctccaagtgtaagtgttctagtgaacaagctggaagctgcagcacctttttatgactcagcattgaaattcatgttcatcccttcttctgtcctctgttggttgaagtagtcagaagctccctcagactcgaggggagggacagagaccaaggaaccatgtgctgcaattggcaaagcagtttttcttcctcctcccctagttcagtgagtggtgctttgggtttccaaaagatgctggctaactcctgaaactgttcttgtccttgcttttactctaccccatcatcacatccactcccatgatttcagtggccactagatgttggtgaatttagtctgatctttctcttgagttccagagcagatacacagattgtcctacagacactgaaaatttaacatactcaaagtgaacacatttatctttcctctgcaaacctgctgcttctgcatcccctatctcaattggtgacaccaccatcagccacccagtaaactcaagacccttccctctccctcctttctgcctttggccatttacccagtcctgataattttgtctcctactctctcttaaatcttttccctctttgttatgcaaatgatccttgctttagttcagggtcccttcatcttgaactattatgataagctcctaaccgttcttacaggctctattttcaacctctcagatccatcctctacagaataacctatctaaaacacaaagctggtcatgttattccccagcttaaaatggttaccctttgtctacaggatgaagtccagtcttctttgttatggtctgcaagacttcttgtgatataacccttgttcatgtctccatcctcatctcccctcagaccctccttttcacttgacttctagcaatccaaaagtttagtgcctgaaacaagcaatgatattccatgctgctgtgactctgtctgcccttctctcttgtcttcctgaaaaacttctgctcattcgagacgagcctggccaacatggtgaaaccccatctactaaaaatacaaaaaactagtcaggcatggtggcacatgcctgtaatcccagctactcacaaggctgaggcaggaggatcgcttgaacctgggagttgaaggttgcagtgagctgagatagtgccgttgcaccccaccctgggcaacaagagcaaaactctgtctcaaaaaacaaaaaacaaaacaaaaaaactcctgctgctcatcatttcaaaccctagccaagcatctcctctttcaagcctgccctgactctactgacatagttcatcatatttccctgactggtctgacttctgtgttatagttgttgttgctgtggaacaaattaccctcaaatttagcagcttcaggtaaccattttattacacctgtctcttttgcataccataccatggtgtgtgttaggtgtctgggagatcttcaagggcacagaacgaaatcttgtagtctgggatcccagttcctgttaggtgctcattaatggttgatgtcgattggaatgaatcaggagtaggtaatacagacaatggcagttgtcctagaatctatgaatgccagtggtttctggcccttccctattttacttgaccttttgactgatttcttatcaagagtcaccaatggtcttttttagatataaagatacccctatcgaatcaccagctgtgcgtgtccaagtagcctggaagggtttgtctgacttcatctaacttcatcttctgatgttctaactttatcttctaacatcatcctctgattgtggcactttctgcttgggtcctcagtggctgctgaacagaactttggccagctgttcttcgtaggaacaaagccttttatcttcttagtgcttgtgcccagtgtagcagtgaggagtgtttgggattacctgaggggaaagagagaaaacaagtagggtgtccaggaacctagaataatccacagagtaattcagaacagggaacattcatccagcatttgtccaacccatatttattgaatgcctaccatgtgctaggcattcttttaggtgctaggaatacaggggtgcaccaaacagatgcaagtccttaacttccattctagagggtgcattgaccacaacccttctgaagcttccattctggagggtgcattgaccatggtcctcccttctgaagcctccatgctggaggggacattgaccacgaccctcccttctgaagcctccatgctggagggtgcattgaccatggccctcccttatgaagcacaccttctgtggggcatcctgatggcagctgatttgactatgagtccctagcccagtaccttgtacgtagcagacactcaacaaatgtttgtggagggaatgattaagtgttgttggacaaatgaggtttaactgtacagatttttctttcttgagggaagggaaccagattttgttaagtgcttgccaggtgcagggcaacttccccttagaagaccctgggcttccaggcagaagtgcccttcagagagagccacacgccatttgctgggccatgtgtctgatttgacagccctccagggtgaactacaaaatgagccctccatgttccggctgacagctacaggtccccagttgcctctttgcctcaataaacagccagcccagaccagttagctgggttgggcgcattggggaatatatcttttccttttttctttttcattgtttggttggcctagtgcaagtgttttaaatagaacagacatcatggctataaaacatctgtaacactacacatttagtaaagttcctggcggactgagttctgtttgattggtgatatttttgctgcgactgttgtttccttttctcttctgtttatccctctggaaaataagttttcttttatgtgaggatttatagaaatatgttcctggcatgtggagagcatggatgtattaggatattggtgtagcagagaaatattacctccgaggcatggccagctttatctcatagagagtgatcttcctaatgtgcaacagtctgttactctttacagggtcaggagctacctaggttaaggcagataaagacactgccttgtgttgaggtagcatatcatttttgctagagcatctctaaccattggaagttgatgggctggcgatggattgattcagggtggtgtctgagaaatcaagggtagtagaattcataataattagtatttaatttatagagtgtgtgtcatgccttttccaagtacttttccttctgttgtttagcctataaaacaggcagggaaggtttgatccccattcacagatgagcagacagaggtgaagtcactagtggggaagggaaggtggtggggagggggaagagggacttaattgtgtgcctgtcattgcagtccattccaaataagcatgtttcatgtgttatctcttttaatactattttgtagaagaaggaacaagtttagagaagctcagtcacttgcagtgatcacctagtaaaatgcattacaggatcgggttgcctgagtttgtcctctttccactccttcagcctgctcagggcactgggattggaacctggccttccaatctccaaaatcttcaaatctgatgctcttttcagcctctatggccctcttaggtttagaaaaatcatcttccgtccttagagggttgagacattcaataaaaggcagagagacttgctcatgatgattttggcctctctcttttactacaagcctttctttgggtttcccccttttccctcaaaggaagttacttgtggaggttggaagaggccagatcagcatatctgggctggggggaatttgactttttttcttgataggtaaaatttatgacttaacagatggctgagtgtatttccaaagaccactgcgctcagggtgcaatgtgcttatcgcttcttatgccttccccacctgcccccacttgctctcttgctcctggggtgtttctggaacagtagaatagctgggcaagaagggacctgctggtgggggagctaatcctagcccgcatgcgggttgcttaggactgctgtccaggtgtcttgctcctggttcatgcctttttctctacttccttgtcaacatctaagtgttaagatcacccagcctccccacccaatggccctactcttcttttttctttttcttttttttggagacttcttgctttgtcacccaggctggagtgcagtggtgccaacttggctcactgcaacctctgcctcctgggttcaagtgattctcatgcctcagcctcccaagtagctgggattacagatgtgtaccaccacacctggctaatttttgtatttttagtagaagtggagttttgccatgttggccagtctggtctcaaactcctgacctcaagtgatccacctgcctctgcctcccagagtgctgagatgacaggcgtgagctacagcacctagcccctgctcttcttcttcttcttcttcttctttttttttttttttgatacggagtctcactctgtcacccaggctggagtgcagtggtaccatctcagctcactgcaacctccgcctcccagattcaagcaattcttctgcctcagcctcccaagtagctgggaccacgggcatgtgccaccacacccaaccaatttttgaatttttagtacagacggggtttcaccatattggccaggctggtctcaaactcctgacctcatgatccgcctgcctcggcctcccaaagtactgggattacaggtgtgagccactgcgcccgagccccctgctcttctttttaatagctggattgaaaagtcactctcccgtttaaaccccacagagattcagccttcccgttgggcctggcctatcctccttgcatcccacaatgtcttatgctgcagtcttttgggaccactaacagtccttctgccagacaggctgcaaaggcccttctcccctttcttcctggctctcccctgctaacctttaagctgcaggtcatgcccagccctgtgctctcacagctctaccatactagaactaacacaggctcttacttgaatgtaagcatctttggagcagagatgaggtctcatgcagtgcttggcacatagtgggtcctcacaacaggtttgatgagagagtggattaatgaacatggcttgccactggagacactcagctgccatttcttttcttaccctcttggtctttctcaggactcagcaaaccttttttcaacacctactacgtgccaggtgcattaaaataatttgatgcttacagcagctctgtgacatataggtattgcccccactttatgcgtagtttgcctaaaattacccagctaggactcaagtccagcagtttcttgttgaaatcccaggctccttctgctcttctgtggctcttcacccctcatgctcaggaagggttttaatgaacaagaatctgaaggccaggcatggtggttcactcctgtaatcccagccctttgggaagctgaggcaggaggatcacttgaagccaggagcttgagaccagcctgcgtaacatagccagaccctgtctttaccaaaaaaaaaaaaaaagaaagaaaagaaaaagccagatgtggtcgtgtgtgcatgcttgtagtctcttctactcaggaggctgagatgggaggattactggagctcaggagttaaggctgcagtgagctatagtcatgccactggcctctggcctgggtgacagagcaagaccctgtctcaaaaaacttggcttttgttgaggcctctatccttgccatttttcccgttagatggcagaagtagcttcttacagagccctggctgcatattagaatgttctggggagtgtttaaaaatactgatgcccaggtctcaccttgaaccaatgagatccctgagggtggggcccaggtatcagtaagttttaacgacccccaccccgcaggccatgcgaatgtgcagccagaattgagaacctctgcactacaggagtgtcagtgtgtggattaggtaaaacttgctcatcagaaactgattgccacgtacatctaaaatatggtaatgaaggtaatcaaggctaagggttgaggctgccatttgttcttttcgtgaaatcaactggagggtttgggggatggggtaacttggctttagaacctgcctaccagcaaagtttttatacactcgctcctaagaagagcaggccagattgttgctgatgagaacaggcctcgttctggcaggtggctcccagtttactggagagatgggctctggaaatcctctcttggtctggcttctctctgaagcttggttttccttaagttgtggtgtatccgagggtctgtagtctcggccattccttctaacatggtttctcagcctgtctgtgatgtttcccaaatgtcatagtgaaggactcagaggttccccaagatgatagatcgggggtggctatttacttctgtttacagggaactttgacatgctcaacttttgtgtagaaaccattttccctggtagttgctacccagataaatggaaatgttttgggaaaagagcaatttgggagctctgagcttgtcaccaaggttgtgtgttcctaaatcctgcagcctgtacttgggctggtttcttttaccctgagcacagccggtgtgaagagcctcaggcatttctcagcgtgggaataggcactgaggagattccagccaggaggagaagctgggagaaaggttgcgctggaggagacagaacccttgtgtggatggtgttctcagggttacgatttcacatttgttgtttcagcttgtgttatttcagccagtgtcctaggcctgttttatagaacggagaacgtgaggctcggaactgttaggagacttgacccaacctcatctgagaaaccagggtcagttatttagcatgtctcagtttacataggtgtgcttgaaaatgggaacttcctattattgttgtatttgcatcatttctgtaggcagaatgaccttgggcctgtgctttagtcatgggaccctgagaccatcgtgccaccatttctagggccctacccctcaccgtgagtcatctgtgcatcttcagaagaattccaccctgggtgggcaactcgggctcccactgctggagtgacaggcacagatggaaagactgagttcataccaaccccaccatcctgtctggctctttctttcccacctctttctgaggtttattaagaatctgctttggctgcctttctcatgctggggctttagaggggcctcttttgtatgcagaaatgcacgacttcctcgcagattcaaaaacagtgaaggtttcttacttaattttgcttaataccactgttgtaaaagattatgggttttaattgcatcagtgtattggtaatcattcaaacacttgagaaagtctttggggtcttccccatagtgggtctgaatcaccgtgtggtgagcactggggggcagcggctcccagagggatggagtgatggagaaaccgcctgcagatgcagagcagcctgggtgcctgtgatcggaatgacggctagccagccacctcgctctgcagcgcttgatgcagggatcatgatccttaatttcctgtgctttccaaggcagccctcatctctctacctttgtcggttacctcccccagcccccaataggagtcagtgctactgtttaggatattactctctgatagtaatctgtggacaggtcacccctgtggctgcggctttttccctagggtaagaggaagtagtattttttaaattagcctaggagggagccaggtagagagctctgagatgagggtggggagcttcagctcccagccgaagcatcctgatcatttcattacaagatcaccttctcctgtaggtgagtttctgttgttttaatcagaggtaacgttgtgccctgactatgttgtataattgtgtgtgaattatattccagctccatataggcgagggctatttttttccttccaattttaaagctatttagagggaaggccaaattgtagcttgaaccctggtgctctctggctaatagctatatacagggagggagaacttggaggaacatttggggttatatttgtaattagtttcctttgaagttaaattaattttagcaatcggcaacgtaaaatattgttatacctttttccagtggtcacctgtgggtgacctgaggcctgtggaattgatgagagacgaagcggtgggaatggtgggcaggcacactttcttggacatgtgggcttattttaagtcatttttgcattcagactcttggcttagggatctctctggcctgtcatttttttttgacagctttattgagatataattcaaataccatataattcactcatttaaaatggtgcaattcaatggattttagtatattcacagatatgtgcacccatcaccacagtcaattttagagcatttttatcacctcaaaaagaaaccgcataccctttagccatcactccctccctctcccctggctctatgcaactactaatttacctgctgtctctacagatttccctattatggactttcatttggatggaatcaaatacaggttgaagatccctaatctgaaaatccaaaatccagaatgctcaaaaatctgaaactttttgagtgctgtcatggtgctcaagggaaatgctcgttggagcatttcagatttttgatttttgaattagagatgctgaactattgagtataatgcaaatatcccaaaatccaaaaacatttgaaatctgaaacacttccggttccacacatttcagataagggatacccaaactgtaatacgtgatgttctgtgtcttgcttgtttcacttggcataacgctttcaaggttcatccatgttgcagcatgtgtcagtacctcgttcctttttacagttgaataatattctatttatggatgtaccacattttgtttatccattcgtctgttgatggatatttgggttgttctattttttggctgttgctgccatgaacacttgtgtaaaagtttttgggtggacataggttttaatttctcttgggcatatactaaggagcggaattgctggatcatatggtaacactatgtttgtttatttatttatttatttatttatttttgagatgtttcactcttgtcacccaggctggagtgcaatggcacgatcttggctcactgtaacctccgcctcccgggttcaagtgattctcctgcctcagcctcccaagtagctgggattacagacgtgcaccaccatgcccagctaattttcgtatttttagtagagatggggttttgccatgttggccaggctagtctcaaactactgacctcaggtgatccacctgccttggcctcccaaggtgctgggattacaggtgtgagccaccatgcccagcctggtaacactatgtttaatcatttgtggagttgacagacaacgctgtgtttaatcatttgtggagttgccagactgttcccaaagcagctgcactattttaaatttccaccaggaagatctggcttgtcatttttgcatctttgctgcaaaattagaaaaggtgaagacatacctgctccttatggtgccctcaatcctcccctttttccaattgttttttttcttatggaaagaaagaagatgacacagtagcaaatgaaggtgttagagcagtgaataggaagggcaagatttggcttctccatttgtcactccatacgctgtttgattttggatgcttaacatttctgagtcttggtttccttatctgtggaagagtggctgggacctgccataagattgacatgaggactaagtcaggcaactcatgggaagtgcatacctcaggcctggcccacagatgatctacagtgagggcagagaattctaggcagggaagcagacacaccagtaaaagggcttttccataggggaaaagtatatctcaacagctcagattttattaggcaggagcctgcccttgcgtaaactctggccttactttcatcatgtgtttttatcagaggaacttgaatccttgtgtcacctttgggttgcttctccttacaggtggctttgtccttcccattcttcacctcaagacaggtgtcatttgaccatttaaagcagagatgtcctccctgtggcctctgccagtgggcgtgacttgccttgcttgggtgggtgtgatgccctcttcccccataattgatagagtttccatgtggactgtggctctgctgtcaccaaaaaaaggtgaggtcaaggcagtggtgtccttgcgcttctcccgaatagatctctgtattagttttgtgggacagctgtaacaaattaccacacactgagtggtttaagaaatagaaatatagtctttcatagttcaagagttcagaagtctgaaatcaaagtgtcagcaggactggttccctctggaggctccatgggaaaaactgtcccatacctctctcctagcttctggtggttgcccgcaattcttggtgttccttggtttgcaggcacatcactcaaggccctgccttcatctgcacatggccaccttctttctgtgtctgtttgtcctcttcttagaaggacacccgttactggatttagggcttaccctatgtccaggataacttcatctcaagattcttaactaattacatctgtaaagaccctgtttccaaataaggtcactttctgaaattctagatggacacgaattttggaggaactctttttgatccaacccagtctcttttccacatgtgatcctagaaacagttggagaagatgcccaatacctgacctgtgttctgactttgcaagctaagtaagtttgccactggattcagatgtgatggtgatagtagttatggtagtgatgaaggtggcaggagggtggctccgagggtgatggtggtagagttggtggtggcaagaatggtagtattggcagttgtgagggtgagggaggatgggaaaaatatggggagaagtagggattttagaggggaggtaccttgaatgaaacaccttggggaatggagtcttggtgttcgggagttctgtgatctcaggcagccctgctcgtgggtctggcatacaaagattggacttaattctcaaatgcagactgataggagaagactgccacattggcagatacataggatttcatcctggattctgaatttggtgagcacttttgttcttcagtgtcactggacaggatggggtaatagacagagcccttgtctgagcctgggaaagctgtcctcctaactacctgccttgcctttaactagcatgcgagtcatctcattgacttgacttttccatccgcacaatggggaggatgaactagaaggtttgcagcatcctacccagtgctagcattttaacatctttcctgggctttctccaccttggggttcccacagatgaggcatcatctgcaaacaagcctgtgttcttggggagtgaagatggcttacattttttcatcatggggaatttgaactcttttaaggaacatgataatagccagagctgatttaattcctgtgggcctttctcatactcatttaaggctctccagagccatttcctgccttttcatgtatttgttctgattaagaaatatttggtttttttggtgtttgttttgtttttgttttccttgtgtgataatgaatatctttaggccagtgctgttggaattaagttttccctttaatctcatttttaaaagtagtttctcttttctaacctccccttaccccactctgccttcaacacacacacaaaacacacacagcacacacaccacacacacacacacacacacatcccatttgctttatcctattttataaaaatacaaacagtggtcccattcctagtgaccgtttctgatgcaaacacattttttaaaagggaattttttttaactcaaaaagccagctctctgtttagaggcagggaggtggagtgctctttgcagctctggttagtactggctttggccagttcttacgtgtaaacagcaattttccaaacgggaatgggtgctggggttttctttatggagccaaggggtatgtggagagcagcggtgtttagttaaattacaggtctagatgcagaactttccagcaatgatttgtgagagcctgaacactccccactgccctttgtgcacacaggcaagagcgcacacacgcacacatgcacacggacacctcctgcttcccagagtgacaccttaaaccataaaaggaggggcgcctgctgggagagggggctgtccccacatggtgcaaggctgtcgggtaggtatctggtgtctctaatggtgggaagcactcacataccaaaatgttatccgcaacctctccactaaaactccaagcaaaggaaatttaagatcaatttcctaatggattttggactgagctccctgaaacagatgggtagctctccatctcagttcactgtggagctgagtggggccatctgagcattttgggatgcagtggctgcttccctgtaccctgtatgggtactctactggtattaaggctgcaggttaggaaacagttacctgaagggcctatcctaggaggaaaacaggtggctctctcttcactgggtaaagaggatttttgtttttttataacccaaaaggagtatagaacccgggggcctgccttgtccagccttctcactgtatccaggtttaaagttccagggatactgaatggttccttaggtaaatggaagccaagactcaaggagtgggactggagttgacccaaacacacacccatgcatgtgcatatacatgtgtgtgcaccctcacgtgtccatagaaaccttgcatagtattgatgggaattcgaggacctccatttagtcccactgaaagtcaggacacaacatcccagccccatccccttcctgccctcctcagtagccatggagatggcaaggaaaccgagagaagaatgtgtgactctagggttctctgcctctcgtgtccctcaccagaatgcaaattgtggagcaggccacagtccatttggcagtcatgctggcagcattctcaaagtaaatcacttccatttcccccagcatgcccctggcgggagaggtcactgtgcacagccctgtcgcccccatagctgtgcccccttctcctaaagccgagacactggtgagcagctaaccaagggttgcccatgtttccactggccttttcacgtttggaaggttttgattaaaacagtttctttcagtgtttgctgaggagtgggatccatcactgtatctgagctggtccctggagaggatgttttagtaacttggacactttggtgcattgtctgggacctggaatttctcatccttttttaaaaaaaggtgttttaaaggccttttggggactgtgtagatttatagctgaatggctgcctctgtgtttagggctctggctaggcaggtttatggctataaggcaacggtggagggtgtatgaagagatattttcatttcaccagttattggggaatgaacaatctgttgacttctgttatttggaatgaagacatgttgtttgttgaattctctgggaccacatgaacgtttggaatatagacagggctgctgtatacccgcccgactctaaacagtgtataaatgagaccatggggttcagattatagtatggctctccagagtttcttcaaattgagaactctactagtgtatgttggtagatcacgttagtgtttctttacagacatttaattacttggctggggtaagggaaaaaaaggaatgaaaaatctaaaattaaactattgggaatctctgcccatctgaaagcatgtagagatgcaggaaagtgtttttgaaattatagtggaagacaataggacagtaagagatgccttttcaaagacacgtttttgtgtaatgtgtcttttcgctgcgtgtttggttctgagcttgaaagatgagtctagtaactgactttggtcagttacagtgaccatttatttagcgactacacagtgccctgctagacacttggcatacattacttaatttactcctgataggaaccttgtatggtaggctaatcattatatcttcattttatagtggattacattccacattctattagaatataagctccggcacctcgcacttaatgtatctgttgaatgaatacattagcaaagttagattagtaaaatttggtgattcatgagtgtagggacagatgtaaatctggaaagggctaatcattatatcttcattttatagtggattacattccacattctattagaatgtaagctccagcacctcgcacttaatgtatctgttgaatgaatacattagcaaagttagattagtaaaatttggtgattcatgagtgtagggacagatttaaatctggaaagggcttgatggaattttgccattcaagtgacctcgatttaccagggagacttaaggaatgggtgagaagggagatggacaataatgagtgagcataagaggccaaccaggtcatgagaggtacttggagctcagtgctgtgcacagtggtgggatcttcatagaatttttcacatgcactatctcatctaatcccccattcatctgaaaagaggtgaaaaaacagtcaatcccagctttaaacacatgagcaagccactgcttggttctaatgggcagaaggaagtagggagtaggtggtatactgagttgttagaataatgtcctcttaaaacactgtggaacgtccatgacaaggatattcaagtttggggttaaccagcaggttgtggtggcatgtgtcttctgtgggagctactaagctaaacaagagctccctggagtctacgagctccaagtttggggtcaaccagcaggctatggtggcatgtgtcttctgtgggagctactaagctaaagcaagagctccctggagtctacgagctccaagtttggggtcaaccagcaggctatggtggcatgtgtcttctgtgggagctactaagctaaagcaagagctccctggagtctgcaagcctctctgcatcatggctatgatgctcatggattcatgggaatcgggcattaggtgggaccttggagccctgacccagcatctcgtgctgcagaaaactcatacctaggaggaagtgagtcctgcccagggtcacacccagagttagacccaggagctggatttccagtgccctacagcacagcctgccagtaaccactgtgccccctggtgtcactcacctcaggctcctgttgaggtgggtcggttcactcattcactcagcagatacgccgggagcctctgtgatgactgacccgggcagccatggctcctatgcttcagcatcctacatcacatcgagttgcagtagaaacagatgacattgtgtgttgattatatgccaacaaactggtcagaccctcacccatcaaattctacaattttgtattgtgacagtaaaactaaaatggcacatagcctaaactcagtctttagaacgaaatttattttcttgattttggctcctacgtgtaagattttggttcccactctgaacagttaatgtcattctccttttttttttttattgtgacagtaaaactaaaatggcacatagcctaaactcagtctttagaaagaaatttttcttgatttttggctcctacatgtaagattttggtctccactctgagcagttaatgtcattgagcttcctactcctttggctttggagctggtaggatttggaaatgtggccacattttttcacacgtacatctacaaaacattcagtgttggtttctatgtgcctgacgctgtgcctggcctggtggaggatttgtagaggagtcaagagcttattgtctggaggaggaagtaacttcacacaaggtggagagcagtgagtgttaagacagggatatggagacactgttagggggtttcagaaaagggtggactaactcctggctggattgataaataactattttgaattttggagaaaggtgctggatcctggaggaaggttacaacttgccgtagttaggttcaggagtggagaggcaccccaaggagaaggacctgcaggaacgaaagtgtagggatctggggattagctgggcttgactgggtgcagggtgaatcaagatgaatcacaggaaatcaggaggaggaatcctggacaaagcttgcagggtggtctccaggtgcgaggtcagcgtctgtgttgcttgcagacgtataccagcaccaagcacaaacagctcagcgtagacagcctgtgcgtacttttgaatcgtgtgcatttcttattgacaggttttgtggatggtttctgggcagcagtttttatgcatttgggtctgttttgttcacgtctcttagctttaaaatagcttgacatgtgatttttctctttttgctagtccatcagaatgaagttgcgtgttgtggctaatgaggttctgaagtctctgtgtctgtatgaaactcaagcttttaggttgccatctgaatgcctgagatatgcagagtgactgtctctagcatccttagacatctaaacgcccgcgccatgcagcttgaatatatctaaaattgccttcctagagaaatgtggagagcagattgtttcagcagcctcttgagccctgctttagataacctggttaacccatgcctttctcttgtcatttcttgcagatggtcacaagaacaaagaaaatatttgtaggcgggttatctgcgaacacagtagtggaagatgtaaagcaatatttcgagcagtttggcaaggtaagcgctggatggggttggatggcacatgccagaagtagcctcatcagtcctaagaagaggctaccgtggcccccgcccctgctacagctgtgtcctcaagaaccttgtccttgaacctggccatcatgatttaagtgaaattcagcagaagctgagatggaagagtctggcttgcatttggtgtgatgtcccacgtgctggcaggagcagacagagtggccttttagtgcagttttgcgggcatttgctggccacacggggcctgggctgggagctggtggtgacggcagctggggagggatgtggggctgtgactcgcagggcaggagctcccatggaagctgctagaggcctgcaggttggtgctgggcttctcccttctgtgcctgtttggaaaatgcattgagagctgagtctccctggggccctttgcagctgaaccctcccctgtcaaatgcccaaggagactcggaaaccatgcgaggcctgtacctgtcagcattctctgacctgaatgtctgtgagacagcagtaaaattaccccctgggctctgcttctggaacaggctgggaccaacccaagagccccacagcagccaggaaacagagtgtgagaaggtgtgtgtatgatagagagtcagaccgactgataggacatgtcaccgtgggtgaggtgtttaattcggcctctttctagtgggtgaagggagatggtgccttgagagtgggttcttgctgaggatgacacattcctcagatggccctgttgccttaggagggctgacccttgttggcttttgtgtataccaccctcctctggcccctgtggaaatggcaggttcaaggaggctgcgtcctgcatctttgagtaattgtggacatcgcgtgggagcccaggtctgggacagtctcctcctgacaggtttgggtcttccctgctgaagggctgacatgggagagagctgctgaggcgtcctgagaagacacagtgcccgtgctaagctccatcacttgtttcctcccacgatgggtgtcgtgcttgccatgggtacaaaggcacagccacccactggccaggctgaaggttctgtgctgttggtttgcccagggtgataggcagctatgaccctgtccccaggtgtgtctgtttgtgaactactgtctgggatgagggccatgacctttattcagcctcaaaatggagatgttcttgtctctggtattaatttctgcctggataggagaccgtgcaacaaagagaagccagcctcctccagcccagccttgcattctgagtggctctgagctgcccttccaggttggttttgaaaaggcctcccccatggccctttctggtattgtcagctggggatggattcattctggctgggtctaaagaatagccaagtgtgttgatgactgtgtacgttatagcacttctctcttccagactgatgtaaagcagtaagggggatttgtccatcacccagccccaccctgcctagggagagggattggaaataattaaatgagacaggtccggcttgcataatggaaagctctggagggtgagccctctttgctatctttctgcttttaaaacaagtccaggggtagtgtttgcaaacatgaagtgggatttctttttcgagccataacctgccttggaatctcatgggcctatttgtgtcagaaaagtcggtgctgcccagatgggcttttagagtattccagacaggcttctacttgccaacacatagcacatctctgcacgtccccaacccttggtttctttctgtctctctctctctctttcttcctttctgtatttctgtttctctctctgttgtttttcattaacacttatcattgtgacccagtatgcctccagtaagacacactgcaagctttggccatgcccacagtggccaccattgctgcccttagaacagttgtccttttgtctgagaagcagtcacaaaccatcttccctggcatggcactcgctgggtctgaagctgcccagttaattttgcagtaatgtttgtggactctggcaggatgtgcagacttatcaagtgttttattaaaagaccaaagaggcttttgaatgtatcaaagccataatgctcttcaatgctcatattttagtagcttttttttcatacataggttctgtgcattatttgtgtctgtctgcagaatggcttatttctcatttggctggtggcttgtgttactgtgtgtgtccccttgggcaggactcaccacctctcaggattctggcataacttatttgaatccagaatgatcaaagtcagggagactctgctgctgggccttgggagcactacaatgattaaatccagtggttgtgaaaggaggtaacaggtaaattgacagactgcctctccccttcggtactttatactctggttgaaggaaacagaatgaatgtgcacacacacacacacacacacacacacacacttgcatgaagtatattcacacacatgtgtacaccccctgtgcacacacatttctaactgtatgaaattgtttttgactctctttaaccaactgcaatttaatgaggtgtatgcgagtgcaaagtgtgggatactaggccaggccatttactcacattatctcatttaatttttctctggggggctggtagtggtattctccatgttgtagactgttaagtggggtcttgatgggattgtctcttggactcaaggtcacagctctccaggaggtagagctgggtgtggactccccctccaggcttgtctgataacagcatctgaactctgcaccctgtgccaactgctgatcagtccccaagatggactgacgatgggcaagatgcaaaggacaggaagatattgtgcccttcagtgtgccccggagtgctggggacctggacattcatcacctcattttacctgtgcagcagatattggtatcctccagtctatttggcgaaggtagacagtcagggccagggaggctgagtgtcagcagaggtcacccaggtaagacagtgtaagagccagaattcataccctacttccttttcctccaagtctagaactttcctttcacagcttccatgcaaggtgtaccactctctttttaggtctccttgccgtcattcctctctcctctccctcatcccatcctgcccgaggtggcagcttctccaactgtttatttcaggtggcaatcaagatgggtaagactgctatcaaggggctgagctaagggagtttaaatatgtcattactgtaagtggagtgggtacagagtgacacaccgggagctttaaataacttaaattggaggcttgtaaacccttttgtgtttttcttccaccttcctcccagaaaacacaccccctctccccaaggttagagatgttgttacttgtttatatttaagatcaggtcacgaagcgtggccactggcataaggactctgccaactgaggttaacagctaacaggttggcagaatccacacgtcaccatgagctacccaggggtgaagatggcattcccacccctgggtagctgttccggggttgtctgtccttggagaagggtaaggcagcagatactccagggcttcatgctgggcctaacagtggactgacctccctgggacagcctgatgggttgttcctttgctggcctcggcttctcttctcagggaaggggttggaaaacttaaaaagggccagatattaaatatttgcagctttgcaatccatgtagtccttgttgcagctactcacttctgctcttgtaggatgaaagcagccatcaccagcaggtaaacagatgcatgtagttgtgtgccaataaaactttatttacaaaaacaggtgatgaaccagatttggtctgtggaccatagtttgctgacccctggactgaattattcctgaggttagttttaagcttgaaaagtcagtaatgtagaaagtattcaaacattaataggatggatagattataatctaaggtatctataggctataaccaaaataatacgttgtcagtagtaataagcatggtatataatcagcagtctaaaccatgttagagtttattttgggacttcatgacgcagggacagtgaagggattctttatttggaaaaagccactatttataaactggaacttcatcctatgagtaagagccagaaaaactgttatagtatttccatctccctatttcaccagctagatgtaattaatgacactcggaatttttgaggtccaggttttactatgaagatccttttactgtgcgctgtttctgaattggagttactggtgctaagctttctaatgcattttacaatgtgcttctcaagggtgtcaagtgagatggttggcagatctattatgtaggtggtgaggctgatgttgagaaaggtgaggaagttctccaagatcactcagcccatgctgaggagagcctggatagtcacttgtttgtgcacaacctacccttcgcctctttttacttttataaagccccacctcccactttaccaccaagcagcatctttctcagaaggagcaggttttgttcatttgtcaaaaacgttgatatacagtaatttgttttactgccctgggtttcttagtggacgttatctgtgttcctgattccatacacacaggaatgatgtatataggccattccaaaaaatggcaggtaaatgatgctccagatatgcccgtgtagaccctggcgacgaggcggcctgttctgcactgttctcccggcagagccacccggaagagcccagcctggtaattaaaatgcactggatcaaagaaactccacacacacgggcttcctccttctccccttcaggcccctccttcaagtaccggtttcttaaattctcacttataggattttggagatcaaaaagaggcctttaaacttaatgaattctccgcttcgtcccggatggagccgttccgcacctttcagctgttcccgggaatgatagggcagctcagtgccgagctcgctaggtaattctcgctttctagaactcctgtgaaagcaaagcagcccgcatttggaggcttccaattatacttcacatggtgaactgtgtaattagtttggaagacttatgcttagtcattggtttatcctaatcggctttggctttccccaacaacaaagtgagcttattttgctaagctgaaacgactctgcaccctttgttcctgccttttattgtctcattcctttcattctgtgttactgccaaagttctgtttcattaggcctacaagtcatttccaattcagtgggctgctacaatccggcctttatcacgggctgctctggttcccatgtcccttctgggccagtgcctgagtttgtggtttgacatgagggctttaaccccttcctgtgccagcccctcactgtggtggccgggaagaaaaggccttccaggaaccggcgtggaaagttacagctcttgaggtctcgtcaaagtgggagatcgctgtggaaaccaggtgaaagggtccttggagccctttgtgtcggattggggttgtgtgggggcccataaaagttaacttgagctctggagaatggtgtgtgaaagctttttaggggaagaaaaaaagaaaacaagagtgaattgttttttttaatgtaatgagaccttcccgtttatccggccagcgtgggcgattgtgggtgagtgaggcccgaggaagcgctgggtgcctgcgatctcccagctccggggttttctgtgcaggtgcgaagctgcattcatggcccccactcagacaccccttttgatactgtatgtgtgaggagagtcatacctggaataaaagtctcataaagccctttgaaatttaaaaggcatgagatctgtgagaagataaataagcctgagagtggactgtgatcctcaggtagtgttttcttgctttaaatgtgtgtcgtagataaacagagctctgtgcagtgtggttctctcagaggaggcttggaaaacaaaagtcttgtgtgtcctttgtggacatctgagctcccgtgaggctttgtcctctgaagtggttcatgtaggtgggttgcccggggagtggtcagcctcccgggcctcaccctgtcctctgctccacctttttctggagagcctgggtgttgcccttcagaccttcttcaacgacaattgtaggctggaccaggaaggaccatgcgcacgctcttccctggctgaaggctacttttgtgtttaaattttcttcctctaatagcccagaacaaagccaacactgtccccatgttttattaatcttctgcctggtttgtgtcagcatctccctctggaagtgtgtcataaggggaggggactttatttgccccctgacccctggccaagctgctcagtgggaaacagcacagcgagtagacaggagaatcctgcttcctctgcctcctccaccttctaggccaggtggcagaggcaaacaaaccttacccatgagtaatatgatcctggggctttgcaggtaaaccctcctgctaaacaactttgtgttttcctggtgaacttttcctccatagactgatttcggctgaagccagtaaggttgtcgagttctaaagattgagcaccctaacgttacttctcttaaattttcgtatttttgcttcaaaaaggagattctgaaatactgggtttctaggaaaacttcccatttccctcttagtatataaaatatagccagctgttgttaggcaaaggcatcagacattattattgctcgttaacagtgttttaaaatatacaaatagaaaactaggatgccttctgggtagcaagctgggaaaactttgagattgtgctaatcaaatgccatgtgcatttgcatagtaggtagaggaacaaggccgaatagaagaacaaggctcaaacttcagctttgctgtttgaccgcatttcctggtatgatttagctgtatttactttttctgctgcggcaaggagaggagagccagcggtaggggagcccttgggcacaaaggagttaatgagccctgggtgggtaggggcgggggggcggtatgaagtacttccaccagctcaccttcccagagtcctcctgggccctctgaagacgtcacttaacaatggagttgttagtaggagaaaataaagcctttttctccctagatgtagttcagtgggaactgaaagtgtaccagaaatcatggttcaagcttgtgccagtgggtgcaaggggtggttcttatggaggagaaagcgcagttcatttagacttggcattgaaatcgaactctgttgttcggtggagtgaacattgatatggagattcccacccgccccccacctccgtaggatacccccttacacaggtcctgtatgcttttctttttcttccattttctttctttattttcttcttttgtcctcttagaaatagtctctctgtagaccggccagatttgtcaagttaccaccctctaaatttttacagctccgtatattcagacttggtatttgtgaattagctaaaagtgggctgccaatctgtactttatttacattcgaagccatattagtgagagccccagaaaaaaatgttaatatgcaggaagaggcaaaagggttgagtttctgactgttgctaacctcaccactgcctttaaaaccaatcatgaggcacacggctgatatttaatagcttttagctgattatttttcttctcctcctctttcttttctatccaagttgacctgggtgtacttgagtggaaatgaagtcatccaaatgctgaattagaataatcacaggcctctaagaatgaaatggaagcagagattaaatggcggagggaaagccggcattaataaggaccaggaaaactttgcataaaataaataggagatggaatagattgaatttgtatatgctgcttccatttcttcctccattttgtgttgtcttcctaagtcgagttactggcaaagtgggatttgatttgccacaaggactcataccttctgcagcctaggtgatgggcctttcttctttgtgggacgtttgtgtgaccattgatgtttccaggaaggaagaatctgatggaggggctgttaccatgaaatgttgatgattacttggtacaagtagtgcgtgggagacagatgaaagagtgtggggcacaggcacagtggctcacgcctgtaatcccagcactttggggggccaaggcgggcgaatcatgaggtcaggagttcgagaccagcctggccaacatggtgaaaccctgtctctactaaaaatacaaaaaattaactgagcgtggtggtgggcacctgtaatcccagctactcgggaggttgaggcaggagaatctcttgaacccaggaggtggaggttgcagtgagccgagatcgtgccactgcactctagcccgggtgacagtgtgagactctgtctccaaaaaaaaaaaaaaaaatggggagtatgggagccagtgcaccacaggccaacttaatattatgatgattcctcctcgtagggagaagacctgggcaggatgcaggtagggtgactggttgtctgggtttgcctgtgactaagggggtttctaggaacttgggccttgcaaactagaatgaattggtcaccttcaagcggagtctggagaagtcaagacacttggcctgacactctaaaagggtcagcatcttccttgaccacctccaaggagatttaaatactccttcctgcgtgctccagaacactaacttcatacctgtttacattctgccttcttcatttaatccagctgctgggtaaacagccagcatggggccttgcgtgagcacaggccggcaagtgttagatgagcaagtggctgctgaaggcaggtcagacagacccacagtctgtctgtctgtgcacccctctgggcttctatttggcgattatttctgtgtctcttgaaaaaaaaaattctgccccaatgtagcgaaaagtgagcttcttgtagttaaagagcaaaataaggatttaattaaattaaaaaaaaaagaaaagaaaacccagcagagtggtttgtttacaggaagtcgtttttaggtggtctgttatagaagatgtaatttgtgaaagtagattagttgtaaattagagattttgggttgtcgaggtcgctaaccatcttttataattggcggcagaggtaaatattttcagatttgcttatagagtgttagtattgacaaaacaatttaaggtgtttttcacttaaggaaaaataagtgagagtatggaatgatcagagacgggcttcctgatcttattcccagctttcttatggaatgacaagggtatggaaagcaacagggagatgaaatgctggagtagtttgcaagggagcttgcagattctctgatagggaaacagttttatttatttgtttatttattttattttacttatttatttagagacagggtctcactatggtttcccaggctggagtgcagcagcacgatttcagctcactgcagcctcagtctctggggctcaggtgattccccaacctcagcctcccaagtagctaggactacaggcatgcaccaccatgcctggctaatttttttgtatttttagtagagacagggtttcaccgtgttgccgaggctggtctcaaactcctggactcaagtgatctgcctgcctcagcctcccaaagtgttgggattacaggcgtgagccaccacactcagccgatttttattctttaataagagcaacccatttcttttatcaacagacttgttttcttagcaaaaagggaggacgtattgatgtcactgctttccattcaactaagttggtatttgtgttcagatttagggattcctgtttgcccgaaccgttcatgtatcttttaccttgtaattgtcccaacagccctgtgaggtaggataattatccctattttaaaattaggtaaggaagactaggagagcataaatgactatgtaagaccccttagcccaacagcagtggggcccaaggttcaaatctagacttcctgggtgaggactctgggtttgttgttaaacttaagctgtttatcctgaggtgatcttctttggggtggccctgaccagttgtttgtagtgccatagagttactatggtatggccaggcgcagtggttcacacctgtaatcccagcactttgggaggctgaggcgggtggatcatgaggttaggagtttgagaccagcctggccaacatggtgaaaccctgtctctactaaaaatacaaaaattagcagggtgtggtggcgggcgcttgtaatcccagctactcagaaggctgaggcaggagaattgcttgaacctgggaggcagaggttgcagtgagccaagatcacaccattgcactccagcctgggcgacaaaccaagactccgtctgggggcggggccgggggaagaattactatggtacctctttgaggaaagtcactctgaccttcctctctgtcacccaggctagagtatagtggcgcgacctcagctcactgcaacctctgcctcccaagttcaagcaattctcctgcctcagcttcctaagtagctgggtttacaggcgtgtgccaccacgcctgaataatttttgtatttttagtagagacagggtttcgccatgttagccaggctggtctcggactccagacctcaagtgatctgcctacctcagcctcccaaagtgctgggattacaggtgtgagctaccgcacctggccagtttgtctaaaatattttatattagaacaaatattatggcacagaatgcaatatttgcataattcttttttgaaacactgtgatacttgcagacacttcaggatcgcttctggctgcatcagttcctggtcattctgggctgtcccttaacgtactttgcctttaggaggagtacataggtagaaaagttgagaatctctattgtttactccttagtataggggctggcaaactttttctgcaaaaggccagataataactatttttagttttgtggcccagatggtctcctagaaccattcagttctgccatgctatcacgatgacagccaaagacaatatgaaaatgaatggttgtggctatattccaataaaactttatttacaaaagtcaggaggctgctggttttggccctcagactgtatagttttcatacccccttggctgagcatattgcctgctaataagagcataggttgtttacactcagtctgtctggtattagacccagctcatctgtttactagcttggtaaccttgggcaggtcatttaacttcttcccacctcactttctttatctgtaaaatggggataatgatggtctttaacccatagggttgtcatgaggattaaatgagctaatgcacacatagttgttagcatcctgctaagaaacagagtgagcacttaacaaatgttagaaacatgagctggtggtgttattttcaacgttggagactcaggtcctctgagactctggagtttccactttagtcctgtctagcagtaggcttgctagtgcaacagcctttatatacacacacacacacactctctctctctctgtctgtctcgttctctcattcatcttttccatctatcctgtgggggagcttaccactcaattcttctacccaccctggcaatgatgcaaactaaaaagcccttcctgcatcttctgagcataaagacgacgattcagttttatgcaattttggtgggatgtacctcgagttccatccggctaccccgctgcttccagtttgtggaactgacttgccggttgccctggctttgatgaaagagttgaaccgatgtaggcccaaagagagttcttctgggtggatccttctgatgaacactctttacatttctttctcgaataattaaactttttttggtaacggatactgcctggaaattgtcccagtatcatttggctgatgtttgttaaaatatctttatatatattgatccactaatctgtttattgcatttattttgcctcctgggagagcttttcagatcctcatttaagtttttctttccttttcctttacatatgattctaataagcttggttttctggcttcttttaaatttatagcaaatattaaggggtggaaagatgttaataaactcagtgtaaagcgagagggagaaaacctataaaaacaaagaggcttcgatcttgaaaagctccgcaatgtaggactgtttagtgcagggaaacagtcatccttcctcattaggcccacaaggcattgcatctacagcctcacgcatcattcatttgttcattgattcattcagcagaccttgattaccttgaatgccaggtaccgagctaggagccaggagcaccttggtgagtggaacagacaagatccttgcttacttggagcttaacaagcatggggtgtgggtggcggaggaccagccaaaagcaagcaaggaaataataaaaataattacagattgtgtcatcaaggaaagaaaccaggagctgagagaatccataatgggaatacggaagagggaatcttggcttatcaagaagtcagatatgtgtagtctctttgccttgacctgactgtaaattccaccaagtggggctgggtctgtttactcaccctgtagcaccaggactggcctatggcctgggcagtagttggtgctcagtaaacagtggtggaatgaatggatcctctgtatcggagggcagggaagttccagtcattggagaaggagtttcaaagggtaaaattaggattttttttttttttgagacagagtttcactcttgttgcccaagctggagtgcagtggtgcaatcttggctcactgcagcctctgcctcctgggttcaagcaactctcctgcctcagcctcccaagtagctgggattataggcgcctgtcaccacgcttggctaattttttgtattttttgtagagatgatgtttcgccatgttggccaggctggtctcaaactcctggccttaaaaggaggtgagcatctgcccgtgttggcctcccaaaatgctgggattacaggcatgagccaccctgcccagccaggatttttctttttaaaatggggcattaagagagtatattccattatctggagcatttccttatgtgaaacccattatttccctgcatcctaggatcccttagctatttccaacccgcagcaaaagcttaatagaactaagggaatatctgggcagggtgagctggtcagtaatgcccttttcagagtcggtagattctcaggcaggtttcggcatagagggtagacacagagaagggaaggatgtcaggagggtaaaaattgggatatgcaactctgtttcatcttctctccttctcttctttctgtctttggtctaagaaaagcagtagacttgctgcttgggaggtaccagggtaggtcagtgactttgaaaagctggtgagacggtgagagcgttgactcatctaggctcatagatgttatggatcctctgggcaccagggatgggggtacttggatgggcatcgggcagtttctctcccagacttgccgtcttgtgatcagccagggtggggaatgaaaatgggtccaacaacattaagccacagcacaatcctccctgatgttgagaaatctggctgtggacatggagaatgtgtttgtgggtacatttttgcctctcgaatgaaccgaatttgccattggcatttactgccagactgtcgggaattatgtggggttgtggggggattatgtggggtgaagttgaacaattctcaactttggaattgggcagacctgagtttgaatccagatcatttgctgttagcattgtgaccctgggctattgattcaactgtctcctgagcctggtttctcatccgttaagtgggcatacaatttcatttacaatggggttgtaagaatgaaaagatacacatttgcccagggtctggcacatgggtatttaatgatagtctcccctgcctgcattccctttctgctccccattccccccaacatcccgtgtttctgaacccccaaattgctgactttcaccaggttcactccctctgataaactccctcccttaatctgcacaaagccctctctgtgtgccaaatggacggtttttggaccagtttcttagttgctcccagcctctgcccccacccctccacagctatccctctgacaaatccggaaccatggaagtcctcattctgagatcctcctagatttaacccagctggagttagtgttgggggaggctaagtggaggatttggctttttttcctcttatgctaatgaagtgaatatggcaaggagtcacaatattttctttccaggcaaagaaatgttgtagtaggagaaacagcatgcaggggaagcaaatgtgatctcactggattctctcaagggaggaataggacaaattgtcagcttctgttgagaagataatactctcactatgataaatgccaagtttctattgaaaaccaccatcttaatggtggtgtccccaagcactcagtgcttgcctggcagccgagaccagaggagaagcagaggaaagcagatatttgtagggggttgtttgtttgcaatgagaaatcagttcaaagcaaaggagatggtgcattaaaaatgttcttttaaggcagctttaaaaagctaactggagtgctccagtgtggcctgatcttaaaacacacctatggggagacttccaccctcaataaatatttcttgcatatgacttgaattaaaggaggcacatggggctggaagccgcccgaaataattttccctcccataggaagcagccgctgtaattcacttgcaagttatttcaaaaggcctgttctgatagaaattgctgccttctcgtggactgggatttttctcgtactgtctgtgacatcccttcttgacaagggtgtgtccgcccatattttacaatgcaccactccctcaaagagcgtctcagtttgttgttgccctttttgggggtgcttatgctggtttctcttagacacctgagtgtggctgatctgcctcacagcctacactcagggagaccttcaggttagttaagggagttcctggggttggggggctggacgacagtacattcaggagctctaagaatgctggtgatcatgggaacaactggagggggaggaagaaggtctcttatcagctgctgttgaaaggtcctaaggtggttgtgcttgtccaaccatccttgcattcaggaacccaagctaggtattaagcaccatgatggggccacagagatgggtgaggtggggtgcccacccatgtggggcttgtggtcaaggagcagagatggtggtaagcagaatcgcagtgtggtatagcaaatggagagcctgccagtgtcactgcgaggtggggacggtggttgctgctgtggagctcctctcccaggcctcccatcctttccctcagctgactcggctgttccctatggtggccgctgaaggcagatcatgtcttcatgtgcctcaatgccagcctgagcattgacctggaaaaggtgcttgacagacatttattctgggctccataaaggaccagtgttgccatggtaggtggaggagaggaggaagcccagagtgtgacttgccccacacacccctggatatcacagtcctgcccctgcccattttggaaagaaccacatggagagggctcacttccatggacctgaaatcgtgagtttgactttgtcatcagctgcagagcaaggagggaggcagtttacatctggatgcctgcattcaccttgcccagagatgctgactgctgaggatgcacctcagggctttacagatgctccccttcttgccatgttcagtctcctccctgagatcttacccctcaacccccaagaagccacaaggcaggtctgcttgtttgacccatgagtggaacggtagatgtgatcttttcaatgtgaaagaacctcagcgaacattagtcagggtgtctcagttataattcagtctcattattgcctcccggatgtgattaacctgggatctgctcatgaagggatttggccgcccaaggaaatggacaaagatgatggatcaggtgcacctgggacagaatgacagctgaagtcagtggttttctgctaaacccataacttaaccactggttgaaagtctgtatcaggtgtcccaaatcaaatgtattgattctagatgcctttttgtaaagaggcaataaaaagaaataccatttattttcacaattgttccttcctccctgtgtctaggaattacagagtcattgttattattcctcctctcattcgtagctccaagtacatagagagcagggcttgacacactttgtctgtaaagggtcagataccaaatattttagactctgtgggccatacggtctctgtccctgctactcggttctgctgttgtagcacaaaagcagccatagacaatatgtaaatgaatgagtgtggctgtgttccaattccacttttatttacaaaaacaggcagcaggcctgtgggccgtaagttgctatcccctgttatagacagtcctagtcgtcaacttgacgtctcaaagaaagcagcgatttcatagaactgaggatattttcaggatcagtaataaactttaggggcatggctatgctcatttgaaatagtcatccttttaatgtaggcacatgtcagaaaggtacattgtattgtctgatgccatccctccaagatatttggaaaaatcttttggagtaagtagctgcaaataataaggactagggagagttaagagcaggcataagcccctgtcagtcacataaggtttgttatagtgaataggcaaggaatgatcattttggggtcttgcttttttcttgggctgtggggtgctcttgctcaaggacaggtgctctgtgtggacgtggtagccacaagctagaggattgtacccacaaacgtgtgcaaaggcttgctcgtcatgcaacacttatctggccacattcctgaaagtggaaggccaaagtgggaacttttatgcagctttatgcgacgggtccttgactctgctcactcacatctataagctgagaatttggtggtaatcacttttctaaaagaggaaaaaatggatccacatggattaatctgcactgtttaggtctgtaaaaaaccagtgacattgacatgtcaatgaaaatggtggaaattaacacttggaaatttttatataaaacctttattgaaaattcagttaaacattcacacactaaaaagagctctatatttataactgaaaaactcaatttgatgcaagctgcttatttctccattgtggtcacgtgggctgaggttcttagtatgaaatgtaatttacacaaattagtccaaggcaggtagagtgtgaaattaaattgatgccttgatttctgtattctctagttaagtgtttctctgaaaattcgtcatttctgtcctaggaactttaaagtatggaggttttctttttttttttttttaaatagagcaaagaagttcttactggttaaggacatgaaacaaccttaattacaggctaaaaaggcacgttccattttgttttgtggctaaatattagagtgacccccaaattgggctgccagtagaggtagaaaacttgggctttaacgcaattattacatttttctttttttttttttgagatggagtctcactctgtcacccaggctggagtgcagtggctcagtctcagctcactgcaacctccgcctcccaggttcaagcgattctcctgcctcagcctcccgagtagctgggattacaggtgctcatcagcatgcctggctaattttttttttttttttgtatttttagtagagaagggatttcaccatgttggccaggctggtctcgaactcctgacctcaggtgatccacccacctcagcctcccaaagtgcagggattacaggcatgagccactgtgccagccagctagtacatttctcaactagctgcaccaagccatctaatttctttggttgtgatgagaacaggttagggctgttagctgtgtagacctagaaggggctttgcagacccttttacagatgagaaaactgaggctcatgaataacattctgaccttggtctcttcggtcaggacgccgtggaccctggctgggcctgcttctgcccctgagtccgcactgctgcctctcactgaggacagttgtcggtgttggtgtcagattgtgtcagtaatcgtagtaagaatgaatcaagtatggggtatcctggttcaaatttgataatccaagaggaaggagaatcactacttgcccagaaataatggaaggccaagatgatctgacgaccttgtaaggagatcaccagtgctctgggactgaacccatctgctgggtcctggggtagctctgttgactgccctctgctgaaaaggagtcaggttgcacctctagggtccaggacgcaggtgattgcattttatcagcatctttctcacaggccaccctccagcaaggtagacatgggtcagccctgccaactttggaatgaatcatttctttcaaataactagcgactgacgttcggggcagtctgaaaaatgaattatgggctctcacgatttttatttgtccatggtggcataggtggtatttatctctcttgtccttgctctcccccacttttggagcctttgtctctgtctgagtcagcatgacatggtttgaaaattgcctgtttggcttttaatgatgattaatgtccatagccatgtttcaaatttaggatctcttgaagagtctccgagaccgttaccaagagcaacctgccgagggagtcggcgcagagctccgtactttcccagcctgaattagattcctcccaaacttctccatctttccaccagcaccccgtgggcccttcttgggtctttgacaccaggagctgagctggcctgcccatctggcaagctccaaccaccctcttgggttagtgcctgtcccatgggctatctggaagggtcactttttcttgcttcttcctccccacccccaaatcagagaggccaatgaggagcttaatttcctcaacagcaggtgtctgtcatctatctgaagatagttgccaacatctggtacaattgcctccgcaaacgcagtaacaaggcggcctgcagttcaggcgcagagcgagcatcgccgctttaatgataacaagctgttggcctcccctctgagatgaatccatctcacagatgtttgtctagttttggcaatcgtattgcactatagctttggtgattatgctcgactggagactattacaataaaagaagtttgaacttgttccatttttataccccacccccttctcccctgttctgaggtataatttatatcaatggctgtaatattggttcccttactgaggcctctttactttttatgatgtcggtggagctgcagctgatagcctggcttcctccacaggttaatgtgttttggctccatcagcgcttttaatgtccacgcttaatggccccgtggcagtcccctcaccctctgtcaaagcgcatgttgacactgagaggtcatgtgattactttgacggagtatctccagctgtagatagttacagcttgtgtgtgtatgtagggcgtgaacatggggcgtgtggaaggcctgatgcttgcacaggacggagtagatcagaaggagaggtttttcctgaaggtggcaacagtaagagacaaggcctgggaatgtagaaccttctagactactggtggacttcctctctgcctctctccctctgtccctcctccccattcattctcctcctcctcctccttctcctcaggcacagtatacttttactgagacaaaataaatagtcctggtgcagtggctcaagcctataatcccaagactttggaaggccgaggtggggaggatcgcttgaggccagaagtttgagaccagtgtgggtcacatagtgagaccctatctgtacaaaaaatgtgcctgtactcctagctacatgggaggctaaagcaggagggtcgcttgagcccaggagttcgaggctgcagtgagctatgattgtaccactgcactccagcctgggcaacagagtgaggcttcatctcaaaaccacaaaaataacaacaaagcaaaataaatagaaatcacaccttggtgaaagggcatttggaggcctgtcaggtagtttatgctgcagtgtttgacattttgggctttaattacacagtggtttaatatttaatactatcaaatgttacacagctttacaattatagttctacatatgaaaattgaaaggaactatcaatccactcaaatcgtatttagtgatagtaaataccaggtattttaaataataactctcattaattgcatctccactgtgtactaggtactacacgaactgcttttattagtagataaatggggccaggtgcggtggctcacgcctgtaatcctagcactttgggaggctgaggagggcggatcatgagatcacgaattcgagaccagcctggccaatatggtgaaaccccatctctactaaaaatacaaaaattatccgagcatgatggcaggtgcccgtagtctcagctactcaggaggctgaggcagaagaatcacttgaacccaggagacggaggttgcagtgagctgagatcgcaccactgcactccagcctgggtgacagagtgagactcagcctcaaaaaaaaagataaatgggtaattcttacagtctccctgtgaggtaggtattcttttgtcttgtcacaggtgaggaaaatgagggtccgggacaggaaagtacatgcccaatggcacaaagctgccaagggacagagagagcgctcagtccagggctagcaaactccagacccatgctcattctccagccatcattgtcaccgctaaccctgctcgtggtctgctttgatgtcatggaaaaattggcccatctgagatgtggcgcattatataaatcagtacagcgtaaatcaccatcatcacttgacatttaagcctttttttcattttaatttggatattactttgtcaaagattaggcaacgtaattttggcaaggtgttatttttggcagtgcacttacgaatgggtgagtcagcctggctgtggatgcatcattggtggcagggcaccatgggtttctttctttgtccagaaatagacactggtctctggactggtgacacttcaggaggctccagatgactgtactgggtgcgtgtatagcagccttctatgaggaactaaaggggccacctcatcttggcctctagataggactctattctttaatgagtccttcagatatgtgggttcgagtcccatagggagagaaaaaacttttcccaaaaagttaaaatagagtgatcttttgtgatgcatatcaaaataaaaaccatgggatggcttatgaaaattaatggaattaaatttcccagaaatggctaaaaatgtgcagcttgcaacccagcagtttattaaagacttgagaacattatcttcgccattcgagttagatttaagtatatgcttttaacctgggccacacacagtaatagaagaagcccgacagaaatgtaaagacctgctaatttcctttgtgatcttgggcctcgtcttacttctctgggccttggctatcttttctacaaatttcggctttgtagacattggatgagatttcagatctcttccagccctgtagctgcattctattctgttggccagcgcctgctcatgcctttccacaattgaagtgtctgttgcgtggatcaccatcaccatcctccttctgttctgagctacatcccaagttgcccaaagtcaggttaagtccagcataatttgccatttgttaaagtatgcctgttgatttgtcatctttccttcttgacttccctccctcagcacagatctctcatgccagtagtcaaatataaaatttttcatacccacccagcgttttgcatgggttcttcactctctcctgcccgcccctcctcaccaaatgagttctttctttgcgaagctggagccaaaccaccaaaatgccacaaagacatgtggcgcagctttttccagtttttctcttgcggtagttacaatattattaaaaatccattaaattttaatgtaccctataaaatatgtgctcttgtgaaagcaagcacagataattatttctgatgaataaaccaagaggacaagtatgtatgaagttcatgctgcagcattcaatttttattatatacatctcctgcaggggcaatcactgtgatgttccagctggttgtgtggagggctggttcttctcagagatcctttggggcagcatgaaccctgaactctccgaatgttctcagagcttgttattacctggaaagagagagccctgtgtaggagctgtcttctgttaagctcttcaaacaaaagaatgaaggactaaatgaatcaggatgagaaaaatgcagtctctctaatactccaaggtatccttctgggatgaggagggaaaaatcagacatacatttgaagatcttctacctagtagctctgttcccttgagccagtctcttagcttctctgagtatttgtttcctaaatgggagatgagcgttctctctgccttggggcttaacagaggcacagaagagcctgtgtctggctcagagtgggaattctgacttgcggtttccctctttcagtctttttcttcttcttctggagatcctttgaaagttttctcatagctccagaagttggaaaacagagctgctgcctggcctcctggagtctgtgtggtgtgaggcttgggagccattaacacatgactatctagtgtcacagctgctggctctggacatctcctgatgcttcaggggtggcttccatattggtttccagaggctgcatgcacctgccaggtggatggaagtgtttcccatgggagttgctgggcccctgtctgccttctcggggtgcctgtggcctctgtgcctgatgactctagggcaggggtctgatgactccaggacagccagtgtcatccctttgcttgcagatgaggtggcttagaaccaagagggaggagcttagcccagcagaccctcctgggatttgttggaggctgtgcttgggagtcggacacctgatctgctttgcaattttatgaggtccaacttctgatcctcagcgaggccccatttccttcctggggcagggttagtcatccggccctgcaggaggtggggcaggactcaggaagcacttggaatggcctggaaatcatgggctataaaagcctttcttcccagggtggcggagtgcactactctcacatttaatcctgcccggtatcctgaagaggggagggccagggttgtaggtgagttgcatggagttattctggaatattccacaactacagttgggactcagctgctgggatcagtggtgaagaaagtcccacattttgcacagaattgggtgatctgtaaatgaaggaagtttatttttaacagcattatgattttgtttaaaaacgaaaagacatactagaaaaaattaaatacataagtaaacagagaactaacaaatcctctcatctcatcaccatgagataacccacagtaacattttggtgtaggcttccagaggtctgtctgcacatatataaactacggttgtgtacacttttatataaatgagatcatatgtggtgtttgccagatggccttttctggtcagtagtatgtcagaggcatttttccatgtgattgtaccctacatggtcatatttgttgccttcattgtttctgtgatatcgatgcactatgattgacttacgcaaacccttagttaggatcatttaggttgtttgcagtatcattatgatcattgtttggtattatagccagttctggcaggaccgcccttgtgcatgcatttctctcctgctcctgcaatacttttgacctagcaattccacttctaggaatttacaataaggagataataatacgttttacaatttgctatttattgccaaactgccccacagggaggttgtactaatttacatttctaccagttaaggcagcataagagtgagcttgagcttttggtcttaggatttttgtgcccaagtctttctaaaatttacattcctctgaaatttgtcatatggaacatttttttttaatattgaagagtgaggaatctgttataccttgacttttaaatacttgttacattgcctctctgttctctgataatccatgaagttgtaaatggttttgactgagtgagatacatgcaggagagtttcaggatagaccgggggttgtgtttctgtttcagattgtcatcttgaaacaaaaatggtggcaaataaaatgttttcaagtggatgtgtttagtcgtgatttttaatgggtttttgatcattgttcctagctgcataccggttttgtcctagacaggatatagctgaagacaaatactgactttttccttcatctaatacatttggcaattacgtcttgccttgtgaaagcattaccattgttatttaaattttgcattgctcttttaagataacgttcagcttgttgcctgtttatctcttccctcctgctgctcttgtgtgcgtcctcacggcacatggggcagtgccctacactcagtagtcacccagtacccattttgggatttttctccaattataaagttttagcattaggaggtctctgagagtcaacttttccccaattgtagacatgtttttgatcttacatacattttaatttatttttttcattcagtagtaaatggttgttgagtgcttttgatgtaccaggtgctgaggtgactgtgccgtgacagtgtccccatcctcgtgcaggtgatgaatgggtgtccatacagccttggaaatgcacaggcctggggcacaggcctttttcctctcctgttgttaccttttacatctgcatttgataaaaaccttctccagagaaaggcttagagttcacagaacctttatttcaatggaggtctgcagtgttcagcgttagagtgaagattttcatgaagcatggcctgacagagaagtgtttgaggaagagattaaatggaagcaaactctttccatctcttggggaaatgggagatgcgggtgtccactggagccagggcttctaaattttaaaatcacttcttcaccaggctgaagccggggtgcccccacggaaggtactgttgaattgcttcgaaggtttctcattgagagaagctctctgtttctcctagttgggactggcatgaataaaagcagaggccaggcgtggtggctcacatctgtaatcccagcactttgggaggcagaggtgggtgggtcagctgaggtctggtgttcaagaccagcctggccaacatggtgaaaccctgtctctaataaaaatacaaaaattagctgagttgtggtgatgcatgcctgtaatcccagctacttgggaggctgaggcaggagaattgcttgaacctaggaggtggaggttgcagtgagcggagatcgcaccactgcactccagcctgggtgacagagtaagactctgtctccaaaaaaaaaaaataaataaaagaaaataaaagaaaaaatgtaaaggcaggaatgtgtacaggacctcacgggatgtggggaaaccagcctggttgcagttgagggtatgagtgggaccctacttctctcccgctgatgaatgaaatgtataaaaccaccttcctcattatgtggtcctaaggctgaaatgaggccacgtacgtaaagtgtcagacacactttacatatgggggttagtaaatgttgccatgtcattaattattaatacattgaattacaaagttatttaatccagcctctccatccaatccatatgggaatctcatccgcagtattcctgacaaatttgatttgttaggaatctcttttaatctttcatatttgatcggcttttaatggtttaaggaagaacatttcaggagtaaaaatctgcttccctgcttaaagagcacatagttccttattttggctttgtgagctctgcagtgggacaactctttccctttcccacatattttgaataattctttaatatatattgacatagatattactatatattatatagattagctatatagacatataaaagatattttcactgtctcagcaaggggaatgcagcaggaaaacagggtgatagtggggagaaagtcagcaagaaaacgtgagcaaaggaatgtttgtatatcagtgctttgatatacatgttagtggttctcaaatttggctatatattataatgatctaaagagcttttcaaaaatacaaattcatggacccatctttggagattagatggtaggactgtggtaaaatctgaacatctttgtttgtttttatgagacaaggtcttactctgtcacccaggctggtgtgcagtggcatgatcgtggctcactgaagcctccatctctgggctcaagcaatcctcccacctcagcctccctaagtgttgggattacaggcatgagccaccccacctggcctttattttattttattttttaaaagagatgtggccttgccctgtcacccaggctggacccatgctggagtgtagtggcctgatcatggttcactgcagcctcaaactcctgggcacaagtgatgcccccacctcagcctcctaagaacccaggattataggtgtgtgccactgcttctggctgggcatctttttttaaaagtcctaatgtacagctgcaattgtgaaacattcattacctgttttcatatttagaatgagggtaatccttctagaggcacacaaagttagctgagtagcaaaaagctgggtctcaaaccaaggtcttctaatttcaaatatcatgttttatctactttaccatgaagctgaattgtgtgagcacaattatgaggtctcctttgcctcccaccctcgctgtattgtccattttccaaggtaaacacacccagttctttcagttctttttactctgtgatttcagtgccttctgctctcctagtaataatatatttaccagccagcatatatttatgatcagtatacatttgtgatgcattctatgggccaggtacagggctaggcattgggactccagagtgcctggaggagaagatcccccacgcttaaatatagtacatttgacatagtccttatccttagtgccctcaagacctttcccagcatatctggctcttcataacatggagagctagtggtccttcctggatctgcgtgtcctcagtctaacccctgcagatctcccttcatgtggggagggccttctagatggcacctgggctatgccgacttaaccctgcatttcaggctgatcccacacagcctccaaataggcactattgctctaaggtgtctgggagagaaaaggttggccccggttttggaaactttggggttttgcgtgtgtctaaaaagattatcttcagtagttttgctctcccagtgagaaaaggagaggctgatcatgtgctgccagacactgggcaaagggtgatgtttgtaatgaccatccagtgactcctgctgccgctgtccttcctgcctggatgtttttggagcttccgtctactcattcagcatccagggaggctgtgatgaagtaaggaccatctgttagggaccagatagcaaggacatttgcagcgcattgaaggttggcctggatgaccagcaagggtttttcctgccctgcatgcctggactcccacctccccacccctggttaggcttcctggttgtggggagtcatagccagtggagctctagtctgtaacaaacacaccatcggaacaacaaaccctcaggtctttcacattgattagataattaaaaaaaaaaaaaaacaattaaaatagctaagcaaaagggagaatttccggtctcatcctggagaaccagcattctggtgtgtgtccttccacactttgagcgcattcactctgcagttgtcacactggtgatgaacgtggacactgggagcaggcaggcctggctgccattcttgcccccatcacttcccaagtgtgtgaccttgggcaaattcatctgtaaaatggtgattcagtagaaagtatttgataggattgggagtcttaagggaaacagatgcatggaagtcctcagcagaggacctcacacacagtgaattctcaatccgatgtttatttaaatcatatgtgccttgttatttgtaaggatggaactccctgcaatgtcttgaggttgttagcgtgtgaccatgagtactagtacacagtgcccattcattggaaattctgtagccaccgaagaaaactcacctcaaagtgaagtgatgctcttttgatggtaaacaccattgttttgctgcacagtaattaggcatgaatggcaaacagttcacatcagtgattgtaattaattagtataaacattttttttttccagccaaatctcagtccgccttctttctcttatcatgtggttgtctggtgttggtaatcagtgtccacactgcccctggggcaagttccttgaaggcaggaatggcagtttcttctttgtaccccctgccccactcctggtctggcaaatgggggctcaggaagtgctggtgctgcaggacagctgttccttcattcactcaaaagttctcgttaatatgcatgcctctaaagcaatggccttattttcattggatttatttttcttgttcttgctcttcacctctcattttcccatatgagagactccggggctgcactcaacagattctgtctgtctgtcttcttctcaaggctggagatctctaagcacccacttttccctggcccatgtgctggtggccctgagtttctagacttagcttgccctctgacccaaggatggtggcccaagttggcagaggtggtgggaggaagcaaggctgtggtggtggttgggtggaggaatcagagcatagggggtcctctgaccatgaagatgaaggagttttcactgtttatagaatctgcattggctgtcctgcccgcctcttcttcctgaatttggcactggttatgattttaggagcacggagaagactcctccaagaattagaaacaaacaaattccatttcctctctctttggctgtaaagcctttaactgaggaccacgtgttttattccacaattgggtgaaatgccctcagttgctgaaacccattccatgtcagatggtatctcctgcccattcattgtgaccctcccgttttgaagaatttatccctccaggcccagtttttctgtaactggcacagattcacaggtgggagcccaggcaggctgcactctaggcatcggccctctctcctcccctgatgctcagagccaggctcctcctgagcacaaaaatcagagccctgtggttcagaacggccaccatgtaggatgtgggtggcaccagctccttgggcccgaactggcagcacagccagggaatgtccttagatgttaaatgggtcgcaggtgaaatgagctgtttgtgtccttgcattgtgagtgtccatgctttcctttgaatttacagggagaggcaggtggtaggtttgggggtcccaaggccagctgtgttgtagcatggtcggtgcggcatgtcttttatataacctgcatgtgggttactggaggccagaggcacctgtggtcttggaatgaggatctctttgacgtgagaagacagatgtcaaaacaacttcctgccacccctggagctgtttgtccaagatcagccattgcatcttcctgtctggcagattgcattcctccccttacctgtttgccttctggaagacttgattgtggtggcaagaagataggccccatcagggtgggcctcattccagctttgcagcaaacaagctctgatttgttggggaggctgggagggaccccacttcactctctgcccccagtgtccacctgcacttgggcaagtcagccagttggttctgtagacagaacacccccttgcagcacagactccaccgggcatttggcggcggtgtggaatatgaagagaaggcttcccccagtctgtaggtacaacttgctctgtccctttgcagcacaaatgtgttcccagtaatctgtgcctctctcccctcaacacgttcagcctttaattgtaactattaatcacgccgagttgtgtcgcacttcataacccttccattaaatattaagcttgaaaaaaattgagctgtcttaattgaattattgaattaccaggcacttaatgtggctctggtggatgagaatcacggaatttcggctttggaagggattttagtttccttgtctgtgacgtagagggtgtgtgaggccccgaggagccaggagacttgctcagggtcggtggcccagaagaaactggagctggtgtccctctttccgtgccttgtcccactgcctccttatggaggaggctgtattcctgggctcatagccattctcaggtttctgcggtgtgcatttctctagtggttcccagcattggggttgggtttttaggtggacgcagtcacatgtgggcatttgaagggctgccctctctggaatcaggcagtctgtccttgggatgagatgctagctggccctttggcttcttccttagagatgtttatgctcatggcctcggccactctccctcttcctccaggtttccgccggcagcccaggcctctccctgtctgactcccccactccctttctgctgggcatttccatttgaatgttccaggctcatctcaccttcgccctcctcacactgacctcactgactccagtctggtctcctgccctgagtccctgtctaggagaagaatggcgtttctgacagctcttcctgactcactcgttgagaccgatgcttatctgctaagcgattcctgtgttcactccttctctcttctgtctgctgtccccatcacaagcaagactgaaccccttctgcttcctgatgtgattccttgtcacggtccctcttgctccaacctgtgttgccctttgctaccagacgcgacttcctgaaatcctgttttcagcagacgatcctctgttcccaacttgcagtggctccctacttcctgccacagtgaatctacagtcctctcaactcagttcacgtccgtgggcccttccagagtgacaggcaccatgatcagtgctgccacctccctttcgagaaaggatttgagacctgtgtggaacaactcggaaagggaggctcagacactgcaggcggcttctctaaggtgacacgccaagttgttgggtgtactgggttgaatggtgttctctcccaaattcgtgttcacctggaacctcagaatgtgaccttatttgtaaatagggtctttgcagatataattaggtaacatgctgttgggaggagggtgctaatgcagtgactggtatccttataagaagatctgaagtcgaacccaggacacacatggggagaagaccccgtgaacatagagacagggatcagagtgatgcatccacaagccatgggacaccaaggattgctaggagcccccagaaggcaggagcaaggcatgggacagactctccccagagctttagaaggacagcttctagaactgcgagacgtaaattcctggtggtttaagccacctggttgcaggactttgttacagcagccctagaaaaccaagacaatagggaagctgtgttttgaagccacgaattctgagtgcaggaatgttctcactgtacacagctgccacccatgcctggcctcccagacttccctaatgcggaccctcgctttgttaatgggtgattgcccgctgtcttcagagttgatcagccccagagatgctccccttccttaagcgccgctcatgcggattgtggttgtactgttgcgtgttcctctggccccctccttctctgttcctaaccagtgttttttgtatgatgtgaatattttaaattttaatttaatttttggtggggaaatacaatgtgatgtttaaatttttaaaaatgttatttttaattgatgaatagtaatggtttatatttatggggtacaatgtgatgtttgtttcgatacatgtatacattgtggagtgattaaggcacgtgagttaatacatccatcacttcacatacttatcatttctttgtagtaagaacattttaacgatttatttttttctggagacggagtcttgctctgtcgcccaggctggagtgcagtggtgtgatcttggctcactgtaacctccgcctcctgggtccaagcaattcttctgcctcagcctcacaagtagctggcactacaggcacctgccaccacacccagctaattttttgtattttggtagagacagggtttcaccgtgttgcctaggctgatctcgaactcctgaactcaggcaatctgcccgcctcggcctcccaaagtgccaggattacaggcatgagccaccgtacctggcccattttaacaattttgaaatatacattaccttatgattaactatagccactatgctgttctgtagatcactggaacttactactcctgtctaactgaaactttgtccagcatctccctttgaccagcaaaccctttgaccaacatctccctccttccccatgcacccccatcctctggtaacccccattctattaatactctctgtttctatgagttagactttttaagattccacatgtaagtgagatcatgtaatatttgtctttctgtacctgccttatttcacttaggataatgtcctctaggttcatccatgttgtttcaaaggatgtaatttcattgttttaagtctgagtagtgcatatatatatatacaccacattttttttttatccatttacccatcgatgggcacttaatttgtttccatgtcttggctattgtgaacagtgctgcagtgaacataaggccagccaattttgattgagtgtcttcaacatgtcaggtgctgtgttaggcactgggggatataagatggacaagactctcactttcatgaaacatacatttcagtggagggttgaggggaaaacactcagatggcaagcaaataacaaacatagcagagagttctctttgctatgaagaaaatttccactaatgtaagagagactgcttggggctactttcttttttattattttattatttttgttttttgttgatcttcccttgagttgcaacttggggctacttttgatgggggtggtaaggcaagtctctctcagaagctggttttgaagctaagccctgaatgaaggaagaggccagctgtgtgcagatatgggaggtagtcattcccgagagggagcaggcagtgcaaaggccctgtgacgggacagaatttggtagttcaagactcagaaggaagacaggtgtgatggcacctggtgtgttggggaagaggcagatgggccacgcagagccttgtgaaccaggggaagaagtttgaattttcttccaagtgccgtggaaagcctttggaaggttttaagcagacaagtgacaagatcagtgtttttaaaggtcactcagatttttctgtagagactggatagtggggagctaggagcaccaaaggtgatctggctttaatgcccagctcaattcttctgtcgtacacctctaatccactgtcttcctcccctgagctactcgtgcacttaaagtcaatacagcatgctcaccacttaattagaaaatcgtttctgcacactaaagagacctccccagccagggagggcctcagggctatgctgtctcacgtaagtctcctttggaatgcccctcggtccttggggatggattcattgcccttccaatgggactgagtgatggattcatgttttatgtgaaattgtcggaggggtagggggtaagcccatccctcctagaaaaaattttatccatccaggaactgccacactcttaataggagacttgggggatttgctctactatacacatgggaaactgaagctctgagaggttgtggggccttgaataagggtcagagcccaggtctgctggaccacaaaacccaaaacttccatgctggaggtggagggttagctcttggaatgaatgcatgcctgaaaaatctataactgagtgatgaagcaattaaaagcagaaggttcctaatggattgtggaagcgggtatcactgtatagtgtagtggttccgagctttggaatgagatgaacctggggatgaatacaggcgtggccgtgggcaagcgacttgacctcactgagtctctcaatatgttgatctgtaagatgggaagaataagaaagtaactacctcacatgggggcagtgagggttaaatgagaaaattcacaaaaggggcttagtagagcctgtggcacagaatatgcactcagtaaatatcttctattgaaaatagactgggactgggaacagattatggaaggaggaatgtgtgttcacaaatgtgtgggaaaaccttttgtacttgtgttctggctattgggttctccaaaaagtatggactaaagaaaactgatgctctgctgggtggatgtggggagagagatccagcgtgggccttgctttgctaagctgagtgttagaaggcatgggaaatgaaagttgagaggttcaagagcctggggcagaggagcccctgggtctgggcagcccatgctcgccgaggaggcaggggggtgagagcaggcagaattggagacttgggtggaagtgaaagatgccgcttgctgtgggcattccaatgaaaccactcccttgaatatgacagcggttaatcattaatatcataaaagttttagaattggagggactgaggagagcatctagttctgcccaaggtcagacagggttattctgcaagcagagatgagtactgacagtactctggttttagagaaaacattttccccacccttcctgtcccttctcctgggttgactccagcaactcacctctcccagctgagaagtacttgacattggattcaaggacatcagagacacttacagcctggagcctggtgtgtgcattgttgatgaatccccaaggttgagccgagacttggatggtaggtcaagtgtctgttgaatatcagcagaaatattttccatcttcctgatgaggagggaatttcaggaagaacatttttggtgtctcatttcttgggattgcctttatcaatcgtgatgcatatttttgggcagtaaccttacttttggatttattttattccccatcctaactcatttcttcgtctatttttatcgtgttgtagctatttttgtaagacacctccaatccctttggaacaaaatgaagtggaaataaagaaatgaagtctcttggcttttgctcccagatcatcagaaagatgactcaatgagccagagctctttgatgccaataatgaacttgggtcaggtcagaactcgaattccaattgaaggagggacttgacagtgggactgtcattcctggggatgatggttggcaataggatggattgggggttgaattattggggacatgcctggagggactggggagaggagggaaagaatgttttcagcgggttgccaggtagaattccaatgttcactgcaatgaacttttcttcaaacttttgtccttggctctcttttcttccgtatgggacagggatgcatttttggtggcttgttaacaagacaaaaataaggagagggatgagaaaaggtaaacagagaaccctacaagttcatgtattctatgccctgcattctgtgtggaccaaacaattcccaaagaggcctaacccaaaataagttagtatcctgcttctagtagcctgtgataaagtgcatcttttttctacttaacttaatcaataaatatgaagtgcttaataccatggagaagaaggcaacaatggtctcaccttcatggggcctaatgtggtgtgactgaccaacattagagacgcacgcagaaagccgtgcacatgcacccgtgtaattacaaagtgccacaggtgctgtgaaaagaaagcacagtgtgtcctacaagagagaaggggaccttatttggattgggtggttatggagggccccttctgaacatgtttggccttctttgcagcagcctccacctcccagcgcctgggagacagtgcaccagtagaggtggggtggggcaggtggtttagcccgagctggggtgcctggctggggacgtgcccagaggagtagggtgtgcggaaggcaggatggggtccccacagcaagctttcctctccctgactgggccacctgttgcaaacagtcaggccccgaggaatagcctccccccagggggagttcagtaacgggtaccatttctcagaaggggctggccgcagagataagaccacagtgccaagggggccataaattgttacctgtgcccttcagttaccccttcttcctccatcccctccttcctgagccagtggggttagatttagcagcagggcttctgttcatgagatggagcagaaagcagactttctggaggctgggcatgatcactgagatgcagagcactgatagggaaaatcaatttaatttctgtggctccgtgacaaggaggggtggcaagcaggaaggtcaggcctgttttgaaagccacagttcagttaagaaaataaaacactccctctaaggaatttttaaaaatacagtattttaggagggggaaaatggaagtgggtcaagatgagggatttagtcggaggagcagagcagacccatggcaatcccagtctgaccggagcctagggcctgagggttgcaggtctcccataggaattttttttttttttgagactgcgtttgtttcattcttgttgcccaggctggagtgcaatggcgcaggttgctcactgcaacccccgcctcctggattcaagcaattgtcctgcctcagcctcccaagtagctaggattacaggcacctgccaccacgcccggctatttgttttgcatttttagtagaaatggagtttcaccatgttggccaggctggtctcaaactcctgacctcaggtgatccgcagaggcataagccaccatgcccggcctaggaattttgttgtatgtctgttgagttgagttgctcaggacttgttgcagtaggggacactttcattaggtttctgtttcccgaggcatgatttaaggcacatttctccgtccctctggttgatgctggggaaggcttggcttctggcagtttttgattgctcagatcaagcctatgtgattcatgggattttacaggttggaggctgagaggtatttgtaggtctggatgaggatttgcactcaacctggttgtggcatgtcgtagtcaaactatggcctcacctgatttagaggacgaggaggactctgcagaaagcacttccttggctgttggtagagattagatatttgcgggcagagagttgggtcaacccaagccttcatcaacatcccacagggacctcccttgaggtgactttcattcattagatggaggatggcattgcaggtcctgtgccaggcactggggagataggctttgtctttttttttttttttttggtggcatctctcgctctgtcgctcaggctggagtgcagtggcacgatcttggctcactgcaacctctgcctcccgggttcaagtgattctcctgcctcagcctcctgagtagctgggattacaggcgtgcgccaccttgcccaactaattttttgtatttttagtagagaaggagctcacagcatagtagaaggctcagactttggactatttcctaagaatctgataagtgaatacatttccaggattcttagcggatggcccgaagtcttgggatagtgtgtgagggccagaggggaaaattgaaacaatgaagagaattgagaaattcctcattggaaacttctgtctgtgatgcttggggtgggataagagggggggtctgttctagctaagattcaataccaatggttatctctttgattatagcttagggtgaggctgagtgatctatctccactgtttggtctccccagagttagctgtttatttcaaaccaccagtcacttgtggtgttttgacctagaagccatgcaaggcagtttgaactgtgcttgaaagggtggggaggcagggcttgttctgaactgtgagctgaggaggcagcgatgggtgccctgtgctctaatagaggtctgagaagtgaactgggtggccagctgggtctgcctgctgagagcttgctggggcacaggaagccgtgcccctcattccctttgaaatagctttgtgtttgtcattcttgtgacttggatacccttttggaccccgtatctgtgggcttagcatcagtcagatgctgtttatcagacagtcttacctggggtttgttatccgtgtgtgtgtgtgtgtgtgtgtgtgtgtgtgtgtgtgtgtgtgtgtgtgtgtgtagcgtggctgggtcagactggattccttgttgagcatctagctaaaagaggttaagaggaggctcatatactgctgaaggccagagggctttgctgaacgctggtcatcttaaaaacgagctgggctatttataatttggcaggctgccatgggacttgaatgaatggcagtctgtgcaggctcacatactctgtgtactgagtctgagcgtgggtttgttcatttatgtgcccctgtgcatgggtgtggatgtgatttcctggcgtgcagggtaaggactgaggaggtggggaagcaggttttgccctggtcctctggtccgccaagaggccacaggtacccttatttatgcctgggatgttggtgtttctggtattttaagccacagaaacgtttgagggagtagacctggactatctctttttactcctgaggaaactaggccagaggggttcccttgggctcagaggaggcctcgggtcaggggccatcccgggtgggagctgtagctctggccagcttgctcctgtcaacactgccccctgccgctctcccagggctgcagggacctggtcgtgctggagacggatgttttcaggcagcgctttgtaggaggcagtgacgctggtaacccactaatgtgaggatgaagtctttgtattctgtttccattgacggggacgggtttgcagaaccacccacacccttgcctgggcctggtgactcatgaggacaagatggctgaccaaggagagggagaggttccactccctccaaggcccagggctgactctttttcatgcatttggtgctaaattgctgccctgaggctcttgaatagcttgtatgaactctggtccacccctcttgcctctcctaaatcccttgggaggtgtccccatgccctacacactgcctgctctgtcacctcaccaccctgcaaccagctgggctggctggttttcactgctgggaggtagattttttttcaagaagtatgaaagtatcattggcatatagacagacctctgcactcagctggaactgggttttgaatcgcagcttcaggactcaataatgttgtaaatctctgaacttcttggagactttgttttaggaagacaggaccctataagacaaagtccctctgtgaggtccagcacagaaggcatctctcaccagggtccctttcttttcccttttctctcagcctgattctgtgctttctttcttccttttcgttgttatttaaacttatgcatgtaatttcagcctcataagggacattatgtagattaattgccatatgggaagtacttaaagcatgttgcctggcacacagtaggtgtgtagcaatagtagtcattgttttaggcaaagatgatgcctgcaggggtttctttcattattatttcactatttatttcataattgtagcttcatggggaggacagaagggtgaagggatctcagggaggcattcttcccttcaccctggagacctcccttgcttggctgtacatttaaactggcctccgcgtgggttcatggtcctgtacatcaacacagctgattttttttttttttgagacagagtcttgctctgtctccaggctggagtgcagtggtgcgatctcggctcactgggtcctccacctcccgggttcaagcgattctcctgcctcagcctcccaagtagctgggactacaggcgcgtgccaccacgcccggctaatttttgtatttttagttgagacggggtttcaccgtgttggccaggatggtctctatctcttgaccttgtgatctgcccgcctcagcctcccaaagtgctgggattacaggcgtgagccactgcgcctggccaacacagctgatttttataaaccttctagagacatttgccttcttggtttttaagcataaacaacctcacttttgtaaaggggagttgctgtaagattcagaacttggagaggtttttgtgtgggcgtttatttttcttaaacagcacgaggtttgtgggattctatagggttttgtacagcctgaccagcagttagccatctcccctccccttctcccggaagaaatgggtgttttgttctccactggcctctcctcgtgtgtttcttcttctgggaaaaaacccacaaccccaggttctgttgcccaagatgagactggatgaaaatcaagaggggttgctgacgagaccctggaatgcccagagaacagaggggtgggagcgagggaggcggtgctggcctggggccatcttactcttcctttcttcctgacaggtgtgtagaatggcatctcctgccggcacgctgggggcctgggatacctctggcagacagtgctggaaatttaatgctccttgaaacaggagagcctgagaatgcttacaaaaatcatccttattaaagtttgaagggatgaagaaaagcgctaatgggagagaccctatacttacaaacccaccttgaaggggttaggggttacttcccacctgccagcaccttccctgctctgaggaaacaggaaacctgatggctgggggcttcagggctctggggacagctaccgtttgcggcctgtctgcctggctgatgtctgtgcctgtctgcagctgaaggcccacttaggacaacaaaatccagccaagccggctggctggggctgagtggggccttttggcttcaggtgactttgtggcttcggccttgggtaaagggagtggggggccatgtgtggagccctctggaaggtctggactcctgcttttccttggctcttctcgttctccaaccacccccaaggttcagcagagtcttgggcgcgtctcctccgtttgtgccgcgtgtttgtggcagcagctgttggtgctgactaataggacttcctggcagctgtgccgggcacacgtggcaccggcaggaactgcctctcctcggctgcccaatctgtaccccaaccaccaaagaaaggcctggaaaaggggctgagagaggctgcttgagtgggaaagccctagaacttggtgactcacagatccatagaacacggttggaagaaccaactcccatctgcagaggggagcactgggtgcctaggaggggtctctcaggtcgaagagcaagttaggggctgagctgacacgtaaaaccccatctcctccctgccccctgaatgtgtttgctctgcccgtgtgagacaggcttgtcagggggtcagcctgaaccgtgtcactcactagctgtgtccttgggcaaagcttttcacctctctgtacctcagttcctccagagacaaaaggggatcatcattgtccctaccttaggggcttttgaggacagggtgagcacccagggcaacgtgcctgggacagtaaacctcagcagatgccactttgctttcttccttaccaaaaactgggcagatgcctctctcctcctgagtccagtggtgtctgtgtcagatgccctaacggattctcaggaattgcagctgacatccggtcatcatctttggtttggggtggatgggggcagagccagggaagaagacaagaaacgggagaacctaagtgcttgctgacttctgccccattcccctcaccccaaacccttttttagaaaggactcgagaggccttttagggtcaagattaccaaggcctgagtgaccctgcagaattcctgcacatggctaggcatcctttgtctgataatgacagccactgctcacacagcgtctacagtgcaccgtcagcagccttaggaggcagattctattatctgctctagtttacaggcaagaacacagcacgggccaggcacagtagctcacgcctataatcccagcactttgggaggccgaggcaggtggatcatgaggtcaggagttcgagagcagcctgaccaacatggtgaaacccccgtctgtactaaaaatacaaaaattagtcgggcgtggcggcgggcacctgtaatcccagcaactcgggaggctgaggcagaattgcttgaacccgggagacagatgttgcagtgagctgagatcgtgccactgcactccagactgggtgacagagcaagactccgtctcaaaagaaaaaaaaaaaagaacacagcacggagaagatgcccagagcccttcactgtgggcccatgagatgacacagatctttccactaggccatcctgttttgttgctggagaactttgtccctggaagggcagaaatgattattctggttgcccaaggcctggtggcccaggtaggagaaggaaccttccaaggcacatccagaggaaagcccggggttggcggggggtggggaggtgtccgctctgtggctataattaagcctctctgcctgctcttccttttcaaccaccagcttttcaggggtttagataacatggctttgtgctgatggccctttcagcactcaaacaggaggacccatctcagctcctggcattcacggggcatagttccccttttctcctcacaatgctgaatttttaaaaagtggagtgttagcataggaagagtagctgatatctgggcgtttttcatagaaattccatgatggatgttttccccaggatgcactgccagtgtcccaaagagagacttatcagttaaacctgcctggctccagaggagtcgccgcagacttcctggtaaatacccccgagccaggaatgcgtttgtgaaatttttaggagatgatcccagaaaagcttccttcggtcaccaagccgcgtgtttgtgtctggagatgaagtgtgtgaaggaagatgtttgctcctgaaatgagacattttgtacatacaagccttttatgtgacattgaagtcagatgctgagctgtccgatgctggggtttgaaggtgaaagttgactttacctcctgtagtgacaaagttctgtgtcagcctgaatttcaatttcctgggacttttgtctgtctacagctcaacatggtatcctcagcacctttggggtcttttgttgtgttgtttgtttttttggtggttaggggagggatgggttagtgacagggcggtgggggggggtgcatttaatcatttattctttttagtaggtttaattgtataaagattataatgcatacaaacgtctgtaattaggggagttggttctattagacaatgttttagtgaggaaaattacagtgtttataagccgtttaaggagggggcagcatatattaacatgcaactagtttttgtgaattcataccgagtacttaccagtgttccccggaggtgtctccccgaattccaaagtgtgccccgttctatgtgcttcctgggcttccttcagcagaaccaggccatttttcagaatatggaacgctattctaggggcttaggagagcaaaccttgttctgtgacggaatgagtttcgttgattcacgagacaaatgtttaggaatgccctgtctctgccaggcactgttccgggtattggggatacagaggtgagtaagacggcaagctctttgctctcatgaagtttgtaatctaatggggagtcagactggaaatgagaagacaaatacacgaacacactccttactgataccgatcggtgcagaggaaatggaagaaagtgttaggctgcagagggactggggagtggggtggggtgtgtgtgagggtgtcgatttaggcatagccttcagagaggcatctctggggcaagtgatcatccaaggacagggagaacgcacagcccatgcagttgccaaggcaagaaggagctttgtgacttcagggaacagaaggaaggagggggagctggcgacagtgagcaaatgaggggagatgaggttagcgaggtggcaggaccagatcatggggctctgccaggggatggtcggaaggaagaattcgcagtgccctaagaagctaaaagtgaaggacctactgcaagcaaaacagtgggatgttctgtccctgcacagctggccccctttggggctctctgccacttggtctcaatgttaaaggtgccaagcacgtagaatagggcctttccctgtttaggcacccacagaagtgcttgactgtcgataccttgagggacaccagttggagaaaaggtcaagcatccgttcaactctgggaatgttcttaacagtgccactaagctgtcaaagagatgcactcacatgctgtaggaacatcattgactctgaatggctccatctgggaataaaaagcaggggctctgaaggatgagtgggagtttgatagaatggatgaaaatgagaagaactttgcagcagaaggaacccacacggacaaaaggcacagtgtgttagacgaacaccaaatcatctggtgtggcaagaaatgaaccttttgggaagaaaagctggggtcaggttggggcacgccttgaagctttggactttattgtgtagctacactcacatatgctttgatgcaaggttgctatgtaaaagttgcctccaaaaatccatgcgctgcaaagagattgaccgtcacccttaacaacaaagctgaagcatctcagctgccacagtacaagtttagaaaattgtttaaagtatcatttatttatgtatttagagatagggtctctctgtatcacccaggctggagtgcagtgacgcgatcataactcactgcagcctcaactcctgggctcaagtgatcctcccacctcagcctcccaagtagctagggctataggtgtgtgctgccatgctcagctggtttgttttgtttcgttatttatttattttttgtaggtatgatacctccctatgttgcctgggctggtcttgaactcctggtctcaagaaatcctcctgcctcagcctcccgagtaactgggtttacaggcgcaagccactgtgcccagcttaagttttacattttaaatcacgcttctctggaagggcggcccctggataggggggaccagttgtggaggacctgttccatgttttatctgagtcctgatcctcctgtcacatgagtacggcccagctgacacagctgtgcagtcaagccctgggttggatgataagtatgtggagtggcatgggtggggggggtgtctcaggttttatagccaaactcccagaagccccttttccctctttgacaactggaagtccagatgatccaaccctcagaggatggatcatcccctgaggagtgcacgacccagtgcctgcgttctatgccattgtcactctggaaccacctgcttggcttctggaatgacacgtttgatcatcgctgtcttcctcttatctttccccagcccccactgacactgacaatttacttctgtctttggggctatgaaccatgacaggggtggagaaggagtggggatagagatgagaccaagatacttcttgatatctgtggaagcctcagataccaagaagcccttcatctgaaatatcactgacgtgtctctcctagttggtttggagcaagttgtgagcactgaggactatcagtttaggtttgagctgaaggagtggagatacatttacaagttactgaacgggaggcaggcaggcatctgtgtgccgcttccacactgggcagctgcagggctctctggtgggcatcctccttctagccttgctgaaagatgatttgctggcatgaaataaagacgtccctaattgtttggggtgtgggaaagcaatcccatgagcattaatttgcccaagcccagagtgtgtgagaaagtgcctgcctgacatgtttttcttttccattaacacttctgtgataaacagcttagatgctcagagaaaaattaatgaaactattgtaacaatcatgcacatgtaggtaatttattaaggacaattaaaaagctttaaaaatcatccgtgaggcaaaatgaacaggaagatggtgtgtggcgggttttggcagggagcctgcccgtgggtgtacggaacaggtttctcttcccatcgccctcacccccatcagagcaacacagcagtggaaagcgtggattcctgctgtccaggctgttagtaacaaacattctatgctggttgcctgttgggtgaagccagggagatgtgtgactgtgtggtctggctgttctgctctaccttccttgggacccaggtatgctggttcctgggcctcccttccaggagcaggagcatgttgggtgacaacttggttattggacttttgttgtttgtgttggctctaggagcctcgaaaccaggtgaggggcagcaagggaagcctagagaggttaaggtggcactgtcatgacgacaccagccacttactagcttggaccttggcctctctgtgtaacgagcctgagcctcagcttcctcatctgcaaaatggggagaatcgttaggaaggagtggaggattggagcgaggatcacacaagatcatgcatgctgagggcctagcgtgatgcctggcaggtatgtagtaaatgttcaaatgtttaatattctttgttatcatgagcggcatcatgattgtgttgttggctgaaagccaagctagggttgacacccacatatcaaactccaaggccagtgcacttttcatgatgtgccagtacccacccactcacccttggatcctccctccaccgccactgttttacaggaatgccaatactgtgtcctgtgtgaatgctaggatgtactcactgagcctccttgaggcttgggtgaggcccctctttggaaggatggagctgcctagcttcctcctggtctcatctctatccccactccttctccaaccctgtcatggttcatagccccaaagtgacagatcttccacactctggaatttttttcacacgtgtggaggactgggattgctagaatttgtttctttttattggttggtgacccaagaaatctttgaccttgtggaccagtggtttctcaaatgcagatatatttaataaagtcagggtctgttagcggatggtattggtccctctctgggtatttatctttattttattgtttttccccaaggcttgatcgtagacacataggttatgtgtccattatagacatatgcatctattttcaagaagtaaattttagttcacttactgactagaaaggaaaagaaagtgttttagagtagacacgtcagacacgacagatttttttccctttccgtgctataaatgagcagtgaaaaatgacttttgctattaaaagctgtagcaccagccaggcgcagtggttcgtgcctgtaatcccagcactttgtgaggcccaggcaggcagatcatgaggtcaggagatcaagaccattctggccaacacggtgaaaccccgtctctactaaaagtacaaaaattagctgggtgtggtggcacgtgcctgtaatcccagctactcgggaggctgaggcaggagaatcgcctgaaccaggaagtcggaggttgcagtgagcctagataacaccactgcactctagcctggcaacagagtgagactccatctcaaaaaacaaacaaacaaacaaacaaacaaaaaactgtagcacctgtaaaaaatagtaaattataggacattatcaaagtttataggcactagaatttgaccttcagtaaattcaacattggagggtaacagggttttctttcctttcttcaaaatgaaaaatgagagggaggaaaaagatttatttccttctggggctggagtaacaactggaaatggtattccccagcttaaagaaagaaagaaagaaagaaagaaagaaagaaagaaagaaagaaagaaagaaagaaagaaagaaaacctttgttaaattacataaagtaatataagaagtcactttccttagaaaaaaatttaaacctcatagaaaaggcaaaagttgtgcggtggctcatgcctgcccagcactttgggaggccacagcgggctgatcacttgaggccaggagtttgagaccagcctggctaacatggtgaaaccctgtaaaaatataaaaattatccaggcgtggtggtgcatgcctgttatcccaattactcgggaggctgaggcaggaaaattcgcttgaactcgggaggtagaggctacagtgagccaagatcacaccactgcactccagcctgggtgacagagcaagactgcatctcaaaaaaaaaaaaaaaaaaaaaaaaaaaggtgagtaaaggcaaaagtccccttgtacaattccgtcccccctccccccacctgctggccaccacccttgatcttattttcatatgtataacagagctttttctgtgcatttatacactcttctgtatactcagagaaaataatatagtcttgttttctcaggctgtccaccctcctcccaaaactttttgccttttcctccatcctttcctgagacttagctggaggaagaggggaagtttgatggacaagttttttttaacatggggttggatggtccagtgggtggtagtggtgtttccaccttcttctctaggttctccttgggctttgtgaagcttcctcgattgctcataatccaggttaagattgagtagatggatagttggagggtacaggtaagtatccagaggagcaaagtgttgggggttgagtaccagatactgtggctgacttgagcttcccgtgcctttagctggaccctgacacctctctgaactaggaatgtagaatgaactctctgcgagacatctgtgcccattgccggattttgagcatgtgaattgtgtgacgatgtgggtgcgtgcatgtgtgtgggtgcacatttaaggaggatttctcggagaagccaccccctcctttgtcctgaaatgcacaatagagatccttcgctaaataagtcagcagatgttaagtgatggtgttggaggaaggcaccttcaaagaactggttgttgtttcagaagcaacatgctgatcagcccatcgtgggctcccagctgtcctgtgacatttctgcagcttcaggtgccagcctgggcatggcatctctgaacagtgagactctccatcctttttctgagagcagaggcctcgtagctgttgctggatcttcacagaaaatgggtccctaatctcattctcacctgcttctacttctgctctgaggccagctgagaaaattgctccagtgctttgctgctgtctgagatttaaggtgggaagttggagctgcagattttgagaaagccacactgcgattcaggaatagtagcgagaccggcacagctgccctgaccagccttcctcctcacatccttgtgaagctgtagtctttaaaactcttcacaactgctgcccagtagaggcagtttggtcttttcagaaagagggaagggacagggtacaatctgtcaccctcatcagctggctagccggttccaaaatgaagccttggggaagaggagtatcagggcgtgaggaagttgtgcagacaggaagccgtgacccctccaagctttgctgaccgttctcaggggggatgtcctcttctctttctttagtgaggagtagctctcccatgtcctcaaatccagctttcccagtgtgggcacctgtgaccacaccctcatccctcaggctccagtgagaagacatggtaagggttaaccagtttggccggcttccctagacgggaaatggaggttcacccagctggtgtctgggaggcaggttctagtcttctttccggtggctctctgggcaatgcatcttgcagccctcttctcttctccaccaggagagcagggagcctcctccagagggggagcaggtgacccgcagtcagccagaagtggccacaggaacccctgtccatcctcacagaggggaagcaacttccccaggccaccttgcctgcaagcatgccagtggcagagccaggactagaagtcaggccttttgcctgctggttggtgtgccccatgccaggccagaggcctgttagtgggtcctggactcgtgaggggcagccgaactgttgcagcagtcttaacaatccatctgcttgcttccactctgtacattaggatcattaaatgtggactgtattttctggacttacaaacaaaagtgggagggaagaccttgtacttgaaaagattgctctctaagatggttcggatttgaagagagaaggcctgaattctctcatttttgcagttataataataaatacttttctttaatacctagaacatgccaggagctgagcaaagtgtattttgtacttcatcttacgtgttcctcttaccagcccatgagggtggttctgtcatcaccctcgtcttacaggtgaggacttggagaggttcaggttctgccttcagtgccacagctgagaggtggggaactgggatttggatgcaggctctaacctcagactggggaaggattctgcatggtagatagggaacagaactgccaggccagtgctggctgagggcttgtttctggttgagggactttttttttttttttttttttaagatggagtcttgctttgtcacccagatgagtacagtggtgcagtcttggctcactgcaacctccacctcctgggttcaagtgattctgccgcagcctcccgagtaactgggattatgggtgtgcaccaccacacctggctaatttttgtatttttagtggagacggggtttcattaggttggtcaggctgatctcaaactcctgacctcaagcaatctgcccacctcagcctcccaaagtgctaggactacaggcatgagccaccaagcctggcctgaggggcttcttgcttttgcttgtggtcacttccctgcaatgctgctgtcttgattttcagggcatcttgtgacagtgactgaggcttgctctcccttctcttgctgcccaggtgatgagcactacaggccttataacctgatgatttggggttgagccatatccctagaacttcctatgtggtgagaagtcaacagtatcacggaacacttggttttgtgtctcatttcagcctagtagagggacaaagcaagaagtttaatgccaacatcagaagagccacttgagcagacacaagcatttgcctgtgtacagcatataccttgtgccgggcacgcttttctattacttcatttaacctatctatgcctagtgttccattatcggaacgccaagcttgtggggagttatttatatcctactgctcaaggtcatcaccaaggtctgatttttcacaaaaatttgcaacctccggcataaatgggttaattctcaacaccatcctcaggataggtactgtcatcattcccactctacaggtgagggattgggctatagtaacttgtttgagatcaaaaagccaggaattggcagagccaggatccaaactgcctgaccccagagctcatacctttatctttctcatcaaaaaccactggttggatgagtacctctctgggaagaaagggctgcatgaccctgtgtgctattacccacctgttggccgccaaggctgatacctggcaggaagccctcattcacagggcagaaggctcagtgaaataaacaggcacccaagggctaagtggagaggactggctcgctccaggagctctgtgcagatcttgagcacattggctcagtatgttattgaaatgatggagctcggggcggagtgatgattaatagtgcctttggcagcccccaaaaccaccaggaactgtggatagtgagaggcccaccatccggtgtcaccacaatggtgctggtgtccaatgaacgtgtgcttccatatactgttctgaagggcagtagtgagtggttccagcccgcctcatcttccctgtagctgctgaaggtatgtctgtcctccttccttccttctttcctctctctctctttttctttttctctttctttttttttttttttttgagatggattctcgctctgtctccaagctggagtgcagtggcacgatcttggctcactgcaacctccaactccctggtccaggcgattctcctgcctcagcctcctaagtagctgggattacaggcacccgccaccacgcctggcaaattttttgtatttttagtagagatgggtttcactatgttggccagcatggtctcgatctcctgacctggtgatctacccacctcggcctcccaaagtgctgggattgcaggcgtgtgccatggcatgtgttttcaagatctcctttgacccaggtctgtggctttggtcctttgccatggactagagttcttcataggcaagtagtccatgtggcgcttgagctcttcactagattaaagccagtagaggtaacagcgcagcccctctggctagggaagaggggtgccgctagcatcattccatctggggcttcacctcatctttgcataccagccctgcctgctgctgctcctgtcgcaggcgtggaagacctggctggaaccctattcctgccatgaccttgaggctgttcagtaacctctgagagcctgattttcccacccaccttatgaagttcttacagagcgcctagctctcattcaggtgcgtgggagatgctcagtgacttcgagttccctcctcatgcctcttcatgtggctctggggcttgtattagagcttccctttcttttagagtacagccagctgtctattgcagcttgtatatgaaacggtctctctctgtggtaactttgcacaaaagatggttttgtggtcagcctctgaataatgcagtgaagcccctgccccccaactcacacacagggagctgtggtcacagtcggaccacttggcagccatcataagacttgaaatggggggtttgaagccattgcttgtgaattagcatgtttttctctcttttgcctttgtgaaaaccaacttcctgtgcagccgcttgtgttttaaaaccctgaaaaaggggggccagctctcagcccttgtccaccgctggttcctaggaccgttatgaattaaagattacagccgttaaaaagagatcgtctttaaacaagcgcagttctctctcctcatgccccctgagtggagaagtttttgtgtatagcgagtccaaaacaaacagagatgttcttgagagatgtggggagcaggggccgagacagcaggagagcgagggcagcagagggacagtgggggagagccggggaactgtagttttgaattgttggcctcctgtctgcatgctcagagaagcagggccgcgtggagtgcccagcggaacctgctcatgctgatttgctgcgtcaccttgggaaaacgttggctttgctcctccgcagcacgcacacaggcacaggcacacacacgttcccatcccagctggtgcccgcgtgtgggtgttaggcacagactctttggacaaagctctggagatgaattgggaaagaagtgtggtagaaacatcaccaggaagctttgtgttacgggccttgtcactgcatgtgaagatagaccagacgccccgcagagacagccctcttgaaactctcacctaaaggagatgctaccaaggtgagggacctccgggcagcagaacaagaacatcgaacaaccactacggtttaacaggagcaagaaacgatctttccgaactttcctctgtggatgcaaagatgttgaagagcagttcctgcctttggcagggaactcggggtgcacacggggagacagacaagaagggatgagtccagggcacttgtatgtctgtaccttctcttagcctcataacatctctatgagggagcgaagaacatcacagctttggccgggcgcagtggctcacgcctataatcccagcactttgggaggccaaggcgggtggatcacgagatcaggagttcaagaccagcctggccaagatggtgaaaccctgtctctactattagtggggcgtggtggcaggcacctgtaatcccagctactcaggaggcggaggcagagaattgcttgaacctgggaggcagaagttgcagtgagctgagatcgcaccactgcactccagcctgggcgacagagcgatcgagactccatctccaaaaaaaaaaaaggaacaccacaactgacttgccctgtgttggagatggctgtgcagatttagtcttgctcaagggctttaccaagggttgtgctcagggcacaactggggctaaattccaaggcctgctgcctttgggtccgtaaatcttcattgcagatgttgatgtagtttccaggactgcatcatcttggagtttattttaggcagatgattgccttctaggtcattctcaaccatttaagtatccttggcaggagaacttatctgaatgggccaaggctctttgagttgggagcaaggcgtattttcccacccaatctccatgcacccgggtcctgtggtttcattggcacttcatttggaaagttgttggcttttgggaggagaaaggaaggagaagtttggcagcatcctgttccaaggcctagagttttaatgtgtggtcagactgtttattgattaattggttttcaagagggaaacatgttctttcaggacatagggtctctaggacaaaaataactttaaaagaagaggtggagatgttagagaacactctaataactcctatcacttcacagctgggaaacctgaacccccaaaggggtaagagattttagaaagtttcaccaaattccccatttctctggacagaattggactctagatggaggactagacattttcccctagagccgtgtttccccagggcattgagaggtgttaggagatgcaagggctccatggccgtacatgtggcaactcctaaattaaacattccctaaatgcaggacttctcagagcatttactctgctaacaagtggtctgcttttctaagagctggttaaggtaggtaatgattccttatttggccaatgaacttattttaaggagactaaattatctttagtctttaaattattttaaaattatttttctcctagaagaccctatgtcttgaaaaatatgtttccctcttagaaaccaattaataaatattgggaagtcaggccaggcacgataattcatgactataatcccagcagctggggaggctgaggcaggaggatcacttgagtccaggagtttgagaccagcctgggcaacatagcaaaactctatctctacaaataaaataaaatcaaataaaataaaattaactaggcatggtactgtatgccggtagtcttagctactcaggtggctgaagtgggaggatcacttgagtccaggagttcaagaatgcagtgagttatgattgggctcctgcactccagcctaggagacaacgtgagacctcgtctttaaaagaagaaataaaataaaataaaataaaactaagaagtcagatgaattctgactcaataaattgaagtcagatagatatatttttatcaactgggcatatacatatataaaaatagatatcagataccatattgcatatatataagtacatattttaataaactatattagcctgacatatatataccttttttttttttttttttggagatggagtctcgctctgtcgcccaggctggagtgcagtggcgcgatcttggctcattgcaagctccgcctcccgggatcacgccattctcttgcctcagcctcccgagtagctgggactacgggcgcccaccaccacgcctggctaattttttgtatttttagtagagacggggtttcactgtgttagccaggatggtctcgatctcttgacctcgtgatccacccgccttggcctcccaaagtgctgggattataggcgtgagccaccgtgcccggccacatatttttaatatatgtgtgtgtatacatattttaatctctcaatggccatcagagatttaggtcacagtgttaccatgctttagtcagaaggaaagaactctgggtcactgtgcaatttctggttggcttttggaagctgacagcctcattgctgatatcttcttcaggagcacaaagtctctgactgggaactgctggctacatggatggagagcccctctccagctctaatactctctgtgttccatgcctctgggttatcagcaagaagcccagctgctcggcccataactcagatcagttagcatataaactccagaaaataattgccctcttaattgctactgataccatgtcttgaaccaggctttgttcaaggtgggatacaggtgggacacaggcttggttcacaggtgggagggtgccctgtgcaggccgtgggaggataatttgagaattcccttgcctgtccctgctccgcggttgctgggcacctggcgagagcgttgggttgtttgctttgggtaactatggcagatccttttaattgccaccaaataacttcagctcaacctcgtcagtggttgttttgctgcgtcgctcggaagaatgcctccctctttgtaagagctggatggatgggagcttggcagaggcaggccaatgctctttaatgttttccttcccatttaataagtgttgagtaaaacttgagtttagggtgtttatgtggcacaaaaggtaaaccatttgtggtgttttggaacctgggctaagtgtttctcacacacatcctcatgacatggtaatgactacctttgtgttaaacttgggtcactgtcaactttcttctgaagtgctccctgctttgttttgggggcaggggtgggaaaggaatgaggtgagagaaggtgaggtgaacatgggatgccgcacgggggcattgtcctcagtcggactttctagaaaaaggcatcacgcggcctggagacaggaagggagagattttaatcatctgctgtggcttttgctcttctgacatcagaatggtaggaggccctgaacttttgacctctggctccaggtccataaatgtcccgaggttcccaggaaaaggaagacttgttagatgggaaccctgatgtttgattagagcagcttttagtcactactgtcatgtgtttgtttattcaggcaccagttgcatctgagtagtggtaggtcctggagacaggaggcacagcctttactcatggcctcatggtaaggtagagtcatgcagaacatttaacgaaagtatggcttggccgggtgtggtggtgactcacgcctctaatcctagcactttaggaggctgaggcaggaggattgtttgagcccaggaattcaagaccagcctgggcaacatagcaagacttcatctctacaaaaaattaaaaaattagccgggcacggtggctcacacctgtaatctcagcactttggaaggctgaggcgggcagatcacctgaggtcaggagttcgagaccagcctggccgacattgtgaaaccccgtctctactaaaaatgtaaaaattagctgggcgtgatgacaggcacctgtaatctcagctactcgggaggctgagacaggagaattgcctgaacccggggggtggaggttgcagtgagccaagatcatgccactgcactccagcctgggcaacagaacggaactctgtctcaaataaataaataaataaataaataaataaataaataaataaataatcagttgggcgtggtgacacatgcctgtagtcccagctacttgggaagctgaggcaggaggatcacttgagcttgggaggatgaggctgcagtgagctgtggttgcaccattgcactccagcccgggtgacagagccaaaccctgtcttgggaaggaaagaaggcaggaagttagggagggaaagagaaaaaggaaaggaaaggaaaaagagagaaagagaagaaaagaaaaagatttgatgggcaaaatcctgtctttggaaggaaagaggggaggaaggtagggagggaaagtggaaaagaaaaggaaaaagaaagagaagaaaagaaaaagatttgatgtacgccaccatgaaagcaggtagaaggcagaggaatcatgaggagctggatgggttcacctggggagagtactaatgggacatgaggcaccccgcctgtgtgtttggagaactacagcagtttgcaatgccagaaggaacaaagggaggcgaggaaccatggcagtagggtggaggtgggcaggggcaggtcccagtggtgctaggaaacttgtactttatccataggcaggggagctgtggcttctatagccttcaaggggaggtcaccattgagccgagaagggagaggagctttctaggcagaaagcgtggttgactgaaatggcagagtgtgttctgaggagggtggcaggctctgggtggtgcatttcttccggccaaaggagagacgtgaggcaggagctgtgtgtcttccatactgtgctcactcaccatgctcaatgctcagaatccctccttgcagaggctgcagccctctttgtaggtgctttggtggaaagttaaatttgattgtcctatgggcctgtggcaggggctgcagtctccccttgtctcagtgccccatttcctctgaagagtgggcattggcaacacccttcatgacacttgagcttgtgcccatggggtctgccggcttctccctgcccttgacccggccgcagagtggactgcacagatcacatgggtgcagtgttgtcacccactcttctctgggctccacacacagacagcatttggcctgctccccgagggccacacggtcatcctaggcagctgttcagtggtaattagtcaacccaagtctcacaggttcaatgactcattgtcttaaatttaataagtacagaaaaacagagtgctgatgtattaaaaaattaatcctcctaagaggtagcctcggcagaggggcttggaatgaagggaagcagagggaatgtgcagggaagtaggaaatttctccttctggggcccgggctgctgtcgggaacagtagggcagagccccaactcttggattttttttttttttttttgagacatagtctcttgccctgtcacctaggctggagtgcagtggagcgatctcagctgacagcaacctccacctcctgggttcaagcgattctcctgcctcagcctcccgagtagctgggattacaggcgtgagccaccacaccggctaatttttgtatttttagtagagacaggtttcaccatgttggccagactggtctcaaactcctgacctcaagagatctgctacctcggcctcccaaagtactgggattacagacgtgagctagaacccttgggttttgagaaggagatggcagctctgcataaactttcttctcttactcttccttttccattaccccatttccttcctcttgtccttctctctttctgtattagtttcctagggctgccataacaaagtaccacaaactgggtgcctcagctacagaaatgccttgtcccacagtttgggaggccagaagtccaagataagggtgcgggcagggttggttcctgctgagggctctgagggacagtctgtcccaggcctctccccttgcctctggtggcttgcgggcagtctttggcattacttggcttgtagacacatcactccaatctctgccttcatctttatgtaaccctctccctgtgctcatgcctgggcctaaatgtcccctgtttgtaagaacaccagtcacattggattagggttctctccgactttctcttgctctgtgtctctctggtgccacctcacctgcctggcccttcatggttcaccttactgtgtgggtcccagccatccaccagagatggacaggtgcctcctgggctgccagcccctgccaggactcctttctttgcctttccagaggtgggtgttgtgcccacgtgaccccagacatctcaccttgcagcttctagattcccctgcccttctctgacaaaacttttcttctggaacattgactaactcctctgtgtaggctgcagttcccagcaggggtttatgagtgtggacaagaaaaagggtatatctatgtgagtctgcatacttggagaatttccttctatcgatcaaaaaatattccagcacagagcaggacattctcctgaataagccttatcacttaaagcatttcctcctcaaaggcaatccatttaggtgaagtgcagagacaactgagttgaaattcatcaagaggggaatgttggcccccaaagcattatgggccattaagtctgtaatgtggcagaggcctctggatagccagagttccttccttcctggtgaattgcaagggctgctgtgccggcaccttcctgttatagtctctgtcatacacacaagcactcagacattctcctggtgtttccctcttccttgggcacctgtgtccataacggaggatggtgatagctgggagactcccgcttggatgtcagtggaggccatggggccccttccaccacaggtctcaggattaaggagctgcagttttcatcgcaacgagtgcccctttccctgcttatagcttggaggacgctagtcctgggctctgggagggatatagatagatacctgtgtccctctgccctctcccttctgctaggaccccggcctgctcagtttgccaagggtggcttgttttccgtctggagtgtcaagcctgcattgagagggaaggcgtggggctggaccttccagcattgtgtatgtaggagtgggggtggtgggcagggtgagtaggacctttgtctgactaggaccaatagttttgaaatgacttgaaaaaaatttgatcttggggaatttccagcatgagtaaaacctagagacttctcagagttttgagaaagccaccccctgtcaagccagtcaccgcttctgtctctacagcctccctccccatggccccactgagactgcctcctgtccaggccctagtcacccacccactaaggctttgccccgccctcccagctggctgggtctcctccccaacagcccggggcttcttctgcctccccatgagcactgccttcacatgggggtgcctccatcagaatctccggggtgttctcatacctggccttccagacccttccctgtccagtccaatcacaacctcagcttcatccattcagcagtgtgaacccactgctccagccccctgctctgcccctggccctggacagcacatctgctgtgcccagtccagagcactccccctctctaaatagttgagacctaccctccaacaccagttctgtgcattcattctctatattatccaaccagcatcgccctcttctttgtcatttgttcgacactttctggatccttagactggaacacttcagactgaagagtttacctgaattttgtcacccctaaagtgtctccaccttgtctactttcacatgtagtttggttcagtttaatgaacgtgtgtgtgtgtgtgtgtgtgtgtgtgtgtatgtgtgtgtgtgtgtgtgttttcaagaatattttctggactcacagtggttctgtctccttggttgatattttgggagatgaggtggggagttgaggaaggaaggaaggaaagaagtgacctggaggtagaaaaagagttggccagggcagtggctcacgcttgtaattccggcacttcgggaggctgaggcagatggatcacttgagcccaggagtttggggccagcctgagcaacatggcaaaaccctatctctacagaaaaaaacaaaaattagtcaggcgtggtggcacgtgcctatagtcccagctactcaggaggctgaggcaggaggatcacttgagcctgggaggtcaaggctgcagtgagccatgattgtgccactgcactccagcctgggcaacggagcaagaccctatttcaaaaaacaaaaaggaaaagcagaggtgtcttagaagcagaagtggataggccacctttctggaagggtctggacagatctcaagtagggggtcagattggggagaacatggttagatccatttctctgaggatggctgcaagcaagaagactgctgcctcgttacggggtgtgggtgtgggccagcctcttcagctggaaggaggagatggggagaggcagggcatcctcccacgctgctgccccttgggacactctttggaagcctgagagttcctggtaggccactctgttcctgtcccttcctcttttctctgagattggtccagtaggcagcctgcagagcctctggcttcagcttggccagaagacgtctgaccttaccaaaaagtccttggttctgagttgaaaacggtccgtctccatcgtcagatatgacagagccccatgagcggtgcccacctggcatgagatactgtcgtgaaagcctgcactagcctccctgttaagtggtgcggcttccttgcttcctgctgacagcactcatcttatacctgccctgggaaatgccctcgtgttgggccacatgaatgattctcaaaggcagaaaaacaattttttttgatggaaccatcaagaatagtttaagcatgtgatattattatccttttcattactgttgtatttctatttaacatgattagatgactagttctgaaaacctaaattaaagcacaggccgggtgcggtggctcaggcctataatcccagtactttgagaagccaaggcgggtggatcacttgagtctaggagttcgagaacagcctgagcaacatggcaaaaccccatctctacttaaagaaaaaaaaacacacagaggaggcattttgttgagatgagagtcagctcacatcacattgcagacacctctctcaaaggcaaaggtcttcctgggcccctttccctaaccagggaaaatgaggtagatccctgcctgggttttttcagaagctgctttgtgtttttgtgtttgttttttcgccatgaaataagttgcccttggtgtcaaactgttgatcttaggggttgtggagtggagtggaggatgaggaaggggagaaaggagcccgttgtatgccaggcattatgctaatagttctatgtccttaattcaggccttacccaaagcccatgggagggtgggtgctggccttcccttttcagaggccactagtctctgttgctggtaatgttctgtgctcttagcctgagtggccatgctctcctgaattccacccttctctccacccaccttggtgggattggaacagcccagaaacccaaactctacttggcagcacatcaggtttttataggcccgagaatgctgaagaacatgaagctttattgcgatgcttttagagaacgttagctcagctctgagccccgtagaagggtttccaaagtctattaggcggcaaatgctttcatggctttggaatcataaggttgatttgaaaaattggcacctaatggcttacaactgtaataaatttcctgaaattggacctcagagggagactcgggtgcacactccccctgaggagtgtgggcagccctctccccagctcggtgcacaccaggctctgtgaagggtgttgctcaccgcagccttcaggaaccagagtcccccgtaattaggggagaggccctgtcactcttcatttctcaatttggacccaacgtttagtggcaatgactgtggggaggcttctgactggaatttctccccactggcctttaaaaggccagggcctgagaattcctgaaaaattaatggggtctctgtgggttctttacacttgctggtaacctggcctctcccaggcccgctgtggctccctggcataatagctgctcagcagccggtcttttgtatgcaaatatgacctaaagctgtatgggaggcggcagtccattgttgcccaagactgtgcgatttcaaacagacacgggcttttaaaatattccagacagatattgaaaatgtcagcagcaggtttttcccacttacttcttgcccagctcttttttcctctctccctccccctgccacccaccccaccataaaatataatcaaaaagctggtaaataatttaaagaattgcctcaaaggatttgcagactagaaagagactcccttctctggtttaagttgggagaaactgttttcattttttttcccccaagatatttaaaatattcaggagtgtcccacagggtcttgaacttataagtgtctgcatttttctcactatactctcatcccctcttttctttattgatttttttaaggttgctgtcggcaacatttaggtccaactttcaaatgaaaatcatatttcagttactggtcttaagtcagaccaacttaaggtctgtttcattcatctcagttctgtgccccctgctctttagtttaatgagagagtggagggaatcttggctgctgtgatttttcatcctattagctctttccaaagggatccttatcttgtgagcagaagggagtgatgtcttatatgtggagtcactgtgtatctttttagagaaacttaatcatccctccctactcaccttgagaaggtctctgggtagccagaagcttagactaagatgagggtgcacagattgggaaaaaataaacaaacctcttattgaccaagcctctgtccctgaagacaggcattgctcctcctgggagaactgtcaggtgggtatgcatttctggatctcccagcagtcctgaggccaggagtctggctggccatgtagagatgattgtacctgggatatggtgcattcttgaaaagcattggatggatggaaaaaaggaagaagtgtgaatggatgaataaagggaagagaaaagaggaaggacagatgcacggatagaaagatgtaggctggatgtgtagatagacgaatgaaaggaatggcagatggacggatagatgatagatggatgcatggatagacagaagggcagatgaaggatggatgggcagatggatcgatgaaaggaaggaagaactgatgaaagatggctagatgggtggatggatggacagatggatagatggaaggaaggaaagagggatggtgagcacctggtttcccctttagtattcattccctcctgctgtatccaaccagagggcattccctgggcctgcccctagaaggtggagagggtgatccaggacctctaggacactggtcctagggaatcccgacagtcttccgtgaacatttacggatgtctgtactgactgaccctccaggaaggccattctcatagcaccctttctctttaaaagcatagggttgcacgtatatggcccaccccccaccccttctgtcattccccctctcctctgtgagggacctgcacactgacagtctctggcccatttttaggtatctggcagtcccctgccagagccagatgtgtcctctctgggtccagccaacaaaggtcacctccttggctgtgtggtctgtcaactaaagtcgttgcctcaaacccagcaatgtcaagtgtagtggataagagctcaggctctagaggcagatggggctgcgtttgaatctctggtgccaccatttactgtctgttacgtaacctcttagagccttagttcccgcatctgtaaaatggaggaaagagtctctacttaagggtattgtgagaattcaacgagacaatgcacacagagtccttagaaacaagcagtggcggcccagtacgatggctcacacctgtaatcccagcactttgggaggccgagacgggcagatcacgaggtcaggagatcaagtggctaacacggtgaaaccccgtctctactaaaaatacaaaaaaaattagccgggtgtggtggcgggcgcctgtagtcccagctgctcaggaggctgaggccggagaatggcgtgaaactgggaggcggagcttgcagtgagccaagattgcgccactgcactccagcctgggcaacagagcgagactctatctcaaaaaaaaaaaaaaaaaacaagcagtggctggcacattgtactcaaacgcaatacatgtagcatttattgttgttactactgaaagttgtgggactgacatctcttgaagaagagatagcaagaatcctggcttctgagaggatcctcaggcacacagcacactgcttgctgaggtcttgagctgtcatcagtgccgggggatgcagtcggtgtggtagagtggctgcccagaacgcgggtctcttgggcctcatccgggcatcctgtgagctctgttgtaaagagcagctgaggatggcgagcgctggggagatgctgtagggggcccgagaggagtcattagctgacctctctctccttgagacagaatcttttcccttctgcttttgttcttataactgaccctctgacagtttttcctcccttgaaagcagaggccttgagtctcctccagctgtcagtttgcgtgttcccctgggcataaactccaacacaggctgcccgataccagctctcaccttcgtttctgccctggagaaaggctgctttcaagttggtaaaagcctcaggagaccatggctggctccaagagcctctttgtgctctgaaatccagaacagccctggccttgttggctcagaggagccttccagaaaaacagaagtcctcgacttctgcctcatcttctagctcctgttcttttctattttaaagcccttaagaaaggaggtgcgaagtccatggtctgtaagcataaaggatttttaaactaaacaagaaaaccaattatttttcttaactgctttagtccttcaaatctttcactgtaatggagatttagaacccatcacagttgggctattatttctgtgtaaacagtgtcatgccctattgcaccaagcaaacagtcaattttttccattacacttagacacagatgatgagggtgccgagtcaatggtctcccgagcaggttttagttgatggggagcgcgtgactgtggttggaggtgaggaaagggttaaggcttacaggggattttggttcttacccaggggtcaccttttggcttcaaagctctgttaatcttcaggccctggcttgtgaacctcctctatccagagcatggagactgggggagagagaagggttggtgagagactagagctaaagtgagaagggcaggaactgaaagtttctttcaactggtgagagagggcacatctccagtgtccccatctccagagtctcccttcttccagatggttctgcttttggatcttctgaagtgcacatctgattttgcattccactgcttgtagccctgggataaaatccagacagctgcatggcccacgggcccctgtcctgtggtgcccacctggacttctttgcttctccagcactaaccctcttgtggacccctgatgatgccatgatgcctcacgctcttttcccagaatattcttcccacctctcccctttctctggcttaatgccttttcatcctccaggacccagctcagatgctgcctcccccaggaagcccttcccccaccccaaggctgactgcgggcctgtcaggtgctgtcctgcagttcccctcttctagcccatacccctctgtattgtaaccctgatctgtcttctccagtaaagtataagctccttgagggcagcctctctatcctcaccagcttagtactccctatgccttgcacagctttgacatacaataccttcatattgaaatttttatttatttatttttttgagatggagtcttgctctgccacccaggctggagtgcaatggtgtgatctcagcttactgcagcctccacctcctgggttcaagtgattctcctgcctcagcttcccaagtagctgggactacaggcatgcaccaccatgcctggctaatttttgtatttttagtagagatggggtttcactatgttggccaagctggtctcgaactcctgacctcaggcgatctgccctcctgggcctcccaaagtgctggggttacaggcataagccaccttgcctggcccacactgaatataaaatgaatagatgagtcccccaaaagcttcgcccagacctagctggcagagtagggtaaaagaatagttgactgtgtgcactggggcggcatcagccttgctgtccacagcagggatggagacagcagtgctcctggcagccagcagctcctgcgggtggaaggtggtaaagcagtaaagtgaagaaggcggaccctgaagccagactgcctgggttcaaatcctggccccaccactgtcacttgggcaagtcgcttaaactctctgtgcctcagttcccttatctgcaaaatgaggttaacaacagtagggcccttatggaggttaagtgacttgctagtaaagcgagcagttcctgctctggagtggccaccccaggagggatggctgttggcattctctttatgatgcttctgctctcttggctctgcccaaggttgcttctggcccatctgaagaccttgcttagagcagaggttggggaccccatgtggcatgtaaccctgggggtggtggctgcccacctcacaccctaccccctactcttttgtttatgccccctgcctggcctctgaggcacttgagtttgtgccttctgtattgacctttagctccatccaaggtttctcgaatcaagctggctctgctaacagactcagccatcaacctgcggcatttatggagcactttttttttttttttttttttttttttttttcagatggagtcttggtctgtcgcccaggctggagtgcagtggtacaatctcggctcactgcaacctccgcctcctgggttcaagccattctcctgcctcagccgcctgagtagctgggattacaggcggctgccaccatgcccggctaatttttgtatttttagtagagatggggctggccaggctggtcttgaactttatggagcactttctgtgtacaagcatcgtactcacaggtgacctgttgatcataaatgccttaaagagtacatttgagctgctccctaatcccatgaggtaggctggtattactcttcgtgttttctccagatgaagaagtcgagccagagagtagctgaaggcgtgcagctgcaggagaccatgcagctgtaagcccccaccccgcctgcgtgctgcccccagcctggggccctgctgttgagcatttttgttttcctcctccagacaagtaccctctcagcccttgactctgcagtaggcttcaaggtccacttctgccccagagcatcagctttctggaaagccatcagcatctggaggagaggagaggagaggggaggggaggggaagagaggggaaatgtcttcagctacaaaatgcctggctcctttctcactcagaggcttcctgcctgaggagcttgtcctctagattttgaggagcagaggggctgaggacggcagagctgagatgcagcttctctcttgctgtgggtgggcgtgcccttgctgacacagggggcgagggtgagaggctcagcagggtgttggagttgctgccggttcctgcctgtgagtgggccttgctttaagcaaggttgagagccgaaataatggatgcctatgaaagacaaattaggaggggattatcatctcacaaaagaaggcttctaaagtcaactcacgaacactcagagtgagagctggttcatggactgcctggcaggcacacctatgctcagtccagggaccggcctccttgtggcagggggcagggcgagctcaggggctgtggccctgcctgctttccctaagggctcttctggggaggagccctgcagatcagatccccttagtgaaggagtagtgactggggggtcccagaagacaaaaaacctagccatagtaggcagggggaggggcaatgccttctgacccctaattgaaggtgatgggaagggagggggccagtgtcctagagactggggacttcctttggggccaaccccatctgggctcgaatcctagctctgctgccaactggcctcatgaccttgagcaagccccttaatgtttctgagctttattttgctcatctgtaatatggggatgatactagtggtaataataatagctgttgttattgcgttgctgtgcgctgtgtgaaacactcagcgtggatcctggtacgtcgtaaacactatgtggtggtggctgttgttatttgtcccgtcacacggagctaccttctaccctgcagcaagttctgctttcctgaaccttttccctactcacagggcacactatccatcattgagttttcccaacaagccacttttcttttctttctttttttttttttggatggagccttgctcttgtcgcccaggctggagtgcaatggtgtcatctcggctcactgcaacctctgcctcccgggttcaagtgattcccctgcctcagcctcctgagtagctgggattacaggcgcctgacaccatgtctagctaatttttgtacttttagtagagacggggtttcaccatgttggccaggctggtcttgaacttctgacctcaggtgatctgcccgcctcagcctcccaaagtgggattgctggcgtgagccaccgcgcctggccttccacttttctttaaatgtcctttgaagctaacaggcggatcaccttccctcccagaagctcggggctgcctgcttggggatttgcccatgtattttgtctgtaatgcataatatatatgcgtgtgtgagtatgtgtgcataggtccccccacacggatgtatatataactcattccccaaagagagatttatttcaaggcacaaatgcttctagttagcttctgtgtggatctgatccagcccagagcctttgccatgagtagaattcattgacggcaaaaagaaatgaaaacaaacattccctgacatggggcatttccgtcggggggcctctgggaattctcctcctctattaaaatatctaccaaattggacagagaaacttggcagccacagcctgagctacttaattgtttctgtggggagggtatgggcagaagctatgcactggcctctcttccggaaccttcctctcaccactgaagtgcaggaggatggggctcttcgagaacagaggatgtttggttgcccctggaatccagctactacccaccttgtctggacaggtgccgagggatggtgaggggagagtgcctgctccctgaccctctgcaagcagctctttgtaaagtttgcaggggaaggtggccagtggctgggaactcacattcctgagatggtctgcagccttccgcttagccccagcagactgaatatgaatgtggttttgatcacaaccagctgatgggagctgacccagacttattatgattttgctgtttttttcggttttgtttttccttctccctcctcttctttatggggaagatgtttcttgaatgaatttgcttcaggggacagagttcaggacggaggcagatgaggggatataggaactctcacgcgaagttgggggtatttgctgatctgcagcacccagggctttttcctccctctctcctcttaaaaatgggccaccggtactgtttcctggggcctctagatgtgcactggtattcatagcagttgggtctagacgtgctcatttattcagcatctcatttaatccttctgcaaggtagttataataattttcattgtacccatctggaagctgagtcccggtgaagtcgaacatcccccacaaaatgacagagcttgtaagtggcagagctgttcaactcatgcagaccaggctccaagccagggctcctccacctcagcactactgacgttgggggccagatgattctttgtcgtgggcactgtcctgtgcattgtaggaagttgcgcagcatctctggcctttactcactacctgccaatagcatcccccacccccagtcatgacaatcaaaaatgtcttcagacattgccaaggtcccctggaaagcaaaattgcccctggttgagaatcactacctgaaacctaagtcctttcttctgcccagtgcctgccccatgctgttactctttgtgggaatatgactttgtgtactgtttttttgttgtttttttgtttttgtttttgtttttgtttttgtttggagacagtcttgctctgtcttccaggctgaagtgcagtggcacaatctcagctcattgcaacctccacctcctaagttcaagtgattcttctgcctcagcatcctgagtagctgggattacaggcgtgcaccaccacccctggctaattttcttgtatttttagtagagatggggttttaccatgttggtcaggctcatctccaaatgcctgacctcaagtgatctgcctgcctcggcatcccaaagtgctgggattacagggatgagccaccgcacgcacccagcctctctgtacttttgaatactaaggtgatcagtggacatctgaggtgcttgatccagtgttgccaacacatattcaacagatatgcagtaactgtgtattgagcatctgtggtatgcaaggcactgtaaggtgtgggcactaagtgaaacccaggcaggagtttattgctgtgcccaggagctgaaggatttaccaaaacgcctagggagggctccctgttctcacagaggtcccagttgagtgggacactcacagtcttgctgagtaacagatgctcacttttggtttttggatggacagatggtgggaacgtgggtgagtgtccaggtgtgccccaaggacacatgcgtgcacacaagagaggagagaataaagcccaagtggcatctttggggcttctggtcattcctcatcaggacctgataggtagtgtactgtcctgtcatctaaaataaacctccctcttgctttatctgagggtctgcatgcatttctcatttctgaaaacctgaagacattttttttcaaatctcttactgtttttgaaaatttacctttaaaacaaacatatgaggaaaggcttccaggcctttgctcttctagtttcaattaattggtaccaaaaatgtctgctagtgccacccgtaaccccatgtctcagggtgtcagaaccctagagagactaggattccttgggagtcctttctgaggagccccagataggagctagtgagaaaagagtgttgtctgtgtgtgtatgtgtggatgcatgcttgtgtacacacacacacacacacgaaaagaacatcagttgttccttttctcctttaaaaactccaagaatgcatttcaaactcctgtctgccaatctctcgtcctcccccagaaatccttggttaagtctttagactcaacaacaacaacaaagaacaaagccacagacaatctctccctcccgacaatgtcagctgtgaactgaagatctgaatagcctttaaaattgttttattgttgtcagcgctgcagaatggtgtgtaatctttgtattctggagaatttttaattggcacaaaagggcagtttagccggcatcttgtaggaggtttgtcatgcaaacggttagtgcctgccactcacaacatatagggctatccaagctgatttacatcagcagctccctctggttaatagccttgtatatttcctgggggtctctgagcagaagtcaagggaagatgaggcttccctcccctcctctgcatccacactgcattgcaacgcattaggaacctcctggcaccttcccctgagcctggatggaggttgggggtgagcagaatgggtccctcacataggtgggagccttcaactagacaactgtttcgtctagagtggcctactggggtgcaatcccaaacaagaagctgtccttcttgctacctgtattagttgggtagtgctagctgctggtataactgaactccaaaatttcagtgcttaacacaatagaagtctgtttcttgcccacttaacagttcagtacagaggtttctggttgccttttcttctgtgcagtgattcaaggataccggttgattcagggatccaggttccttccatcttagagctttgctgtcccttaggacctcagcgtggctgagggttgggcaccaaactaaacactttggatatattacctcatttaacccttaaaacagctcttagaagatgatagtgttttcatttgacaggtgagaacattgagattcacagaggctccgtcatttgttgaggatcacatgggaatgtcatgggttttccagagccaagtaaggaaatacctggttctcctcccagtccccatgccccaacccatctagacctgtctgttctcactctcttccccatttaaagcttgtaaaacaagattcttctttttccaaggcctcacccccgtctggccagctgtctcatgcttagcaagtctttgagacagggactttctcatagtggggacagaaaaattctaccaaattgagcctggccttaactgtggaaaggcagggtagggtcaaaagatgaattctagaccattcacttctgttggtccataaggcctggtgtgtgtgtgtgtgtgtgtgtgtgtgtgtgtgtgtgtgtgtgtgtgtgtgtgtgtcggagggtgaggaagcaggagctgtttatctgtactctggagaggtaaacacagcaggtgggccccaccgaaggaatctcttgacaagctgggctttctcgtgacacaattgcctgttaatggattcagcatctggcagtttcaccaaaagccgactgccaatgagcctggctgctcgaaacccttgacactgctgatcacaaatgggtttccttttgacgccctgcgctgctcctgaaatggtcttgatcaaacaacagagtagtagttaaccgaaacccatgtcctagaattctcctccttccccacctcccgcaagcaaagtgatgtcgatgtctgcaggggaaaatgagaatgggccctcaccccctagccctgcaaagactgtacacatttgtacaaagcctactgagtgctctgaaagtagcttttgcttatgcattgatgcaaaatgcacccaaggggactagactaagccagggagggccccaagagaaggcagtgtgctaggtgctgggggtggagaggttggcaaaaggaacagcttctgaagctttgagggctctgagagaaagctttctcttcttagatgttggggacttgacatccctgtccctcctgggtgatttcctggcagaaaggtcaggaacaagtggcagtcatgagtggaaggcatttgaagcaagagactatcgcagccttggtttaatccatgtaaccagccccttctgcacctccaggagtggagagagagccacagctattctctcttctccccactgctaggatgctggctgcagctcagagggtaaattaagcatgtagagagcacagagcctctgcccggcctgctcctgagaagactcgcccacccagagaagctctcgggtcatctcctcacgtgctctgtagtctcttagcagacggtatgccacactgggcacattgatggcgggcccactggctgcaggccaaaagccaatagacagttcatccagaggccccctctttagctctgggggagtttgacctctgctgatgagaagaagccatttggcagaatctgcaaggcagaatcgatggcacctagtgggccccagattcaagaatcctgggtgccctgctggctctgatgtacatctttaaagctacttttccagcacaaaagcactagagaagcctttatttgttacttaatgcttgtgttttgtttcaaattacagaacttgaagcctttaggatgcactgccagatatcttagtttcttttctcaagaaaggaaagtccacaggcccctgaagcacgcattgtactactatctccccgacaaaaccaagtgacatagacagattaccactgacgtctccatgttacatccaaggccagcactgatgtcattgggtttctgaattctcatgttgagccagagatatgacgaaggccaccgtgaggtctcagactgccctgggagaatcacacagtggttctcagagtcggaaggaattcagggatcctgttctagattttagtgcaaagcagccttggttttggccatgggcaagaggccaagccattcattcattgcttttgttcccccaccattgctgaaatactgatttcttttctctaggaaacaagcaagacttaactgtttaacctgtgagagagtcgctactttgtctctttgctgctgcatttgttcattcgttcattcatttaaatagtcagtgagtgtgtgctgtgtgctaatgccttcctatgcactggggtggaaaacagaactccagccttcatggagcttaattctggcaaagggctgccagccaaacaagtagaagactgtgtgtgccccagggggataacagataaggaacaggactagagggaaggggtgggagtgctttggcagagtggcaccttccagccaatagagccctacaaaatgatggagacccttgggctgctgggggattgggaggactgacagcaatcaggatgaaggacactctgagaccagccccacagtttcaagccattttttgggaatggggctttgagtgttggggttgagggagaggcagccccttttgccttgcgtactggggcatgcaggatttggagatgggaaaggttagtttgacctggagcataggttccttcttatgtcatcatattcctggacaataaacctggcctttgggtcttaactgtcttctctggactcagtgttcctgattgcttctttctcagaatgggttgttttcccaaccctgctgtgggtaaaacatcccagatactccatttttatatttaaggtttaatcgtaaatgataattatatttaattatgggaaattcaacatttctttcaatgaagagcaggaaggacacatcaaaagaatcaggattagaaattctggttctcaagtaaagcaaagcagcggtgaaagactcagacacatctgcactaattggagccactgaactttgtatttttgtttgttcttcatggtgggctgtcacctggacagcaaggttctcatggccacatctgagctgccatccctgagacctactgtgggctagacaggcaccttcccacatgatccatttgatcctcattgataggtatgagaagtgggaatttaatttttacacattgggagactgcagcttgtggagattgagtaatatatccaacgttctgccagcattcaaacccaggtcagaacaactgaaatgtgttatctttctacttcacattaccaactcatgaaggtccatttattttttttgagtcggagtcttgctctgtcacccaagctggagtgcagtggcgcagtctcagctcactctgcctccccaggttcaaacgattcttctgcctcagcctcctgagtagctaggattgcaggtgcccaccaccatgctcgtttaatttttgtagagatggggtttcaccatgttggccgggctgctatcgaattcctgaccccaagttatccacctgcctcagcctcccaaagtgctggggttacacatgtgagccaccacgcccagccacgaaggctcttttgtcaggagaaaaagctgtttcaaatatcagcctagcaaagttaaaatatgaagaattaatgttggcatgttagatatcaatgtaaccattaaaaacaaacccaaaataaaaccccccaaaagctataactttcttaatatttcttaggccaataaacaggactcatgttgacattaactgaagttcaggctccaaccagcagcaggagagttttgaagctgcagaagagatttcttgtcaccttcatcagagtatctgccttaccctaagcccttcagtaatatattcagaatttcaagattggatcatgtgagcaggacttaacaggcctacctctgcctgagcttggctgggtttcagacctcagccgcagagacgaggcactataaatagacgagggaaagagatttagctcaaaaatcctgtgttctcagaattgccaccttctaccttttgggccaagctgtcctagcgttgaagccatgatgtttgcctaggtaacttggcatgagttagttttcatgccagcccacaccccagtcacagaaccatggttccttgatattaggtgagcattgacaagaaggtgactttagccttggccctaaatatgaggaatacagtcagagaacttcttccttagtggcatgcagtgaaaggagtgggtttgtattgccagtgaccattaggatgtgaagactggagatggcattgataagggagactcataggatttcagtgactcatagtacaggatggtatacacaaggcactggagaaagacccatttcctctgggttcatggtaattacaaatgcctttagtaatctccccaggctgttaaccattgtgggtgcaaggaaatctgggttttcagtgacaaggtattaaagcctgcatttccctgttgttagtagttgctgcttcttagcttgatttccttgaagagactgaagagtagcagccggcaagtaatgtctttcaaaaggatatatccattctgctgaaaagcatggaaccaaaataatctgtaacctattccacccaaataaataagtcagcaaataagtctgctttcattgtattgtcttctccataaatatcctttaaattgaggctgagtgacaagatatgcttctgccactaaaatggtatcactgatgatattgaaagagcctttaaaataccacaattgtcactgaaactatactttgctttttttcccccttctcctttgctagtaactaggtctctttgggaatttttaaagtgacaattggtagattgtagtcgatgatatttcttccacataatacttctgaatgccactcaactctgccttgattggctccaaatatcccaaagaagaaaaatgtttcatttgaaaatgtaaagcttattggaggtcatttgctccctaacttttacccctttgcagaaggggcaaggaaaaggcaacagtggtaagactcggcctcaaaggaacataactgctgtcaaaatcaatccatagctatcggcttgagtacagggtggtatatgcttattagattctcaaatgttattcagcttgattgcagcttttatacaaaggagttaagacacgggtaggaaagataatagaactataaattgcaagacagcttcttatgaaatcagtaaattattcatttaacagttcactctttgttgatttcatgttgctatggcacctcaagatggaggcgagtcagtccaccggcccaaccaggggccttacacagatgcacaaatcctggtggaaggcagataatgcattacgtacaaccttcggccacatgataaattgcctgtttatctggcaaattccaaggagatctgctggagagaactgaaagagatatctcacagtggctaacatttcttggaagagacccagccatctcagggtttgagtcagaatctgtttaagaaggcattaagaatgcattgtcttggagtgtcttgcctgtctcccgagattgttggaaacaccatcggctcacagttgctttggcgttcacgctacagtaaatgcctgacttcatttattattttgatgggcaaagaaaactgcctgccgacagccatgctccttcctaagctcttcccagacttacttttgtagtccttctctacccgtgtacaatttgatttcttgctgcttgttaaattattgtacttacgaaatatattgccatggccaagtctgtcattcgtgtacatggcgtggaagggagtttgggtgccagaggagttaggaagcttgatgctgttgttggccgtgactttggtgacagtgtgaccttggacaagttcctttatctctagggtctcagcatcttcatctgaagcatgagaagtttggggtggtcccttccttctttaacctcccgagactctgtgcctctcacatgtatagattccctgtttgtagacagcagtgctgttatggggacctctgaaggctatctgaatgtgcctgcatttagcaagtcaaggccagaccctccagatgcactggactgtggggacattttgtgtgagtgagactattaagaatttagcagttcattctgacagcttgatagatggagtggttttgcatggcatccatgtaggaattgactaaaaaggaaacattttctgagagtccggctgtgtgtgcatgctgggaggtttttctcaaatcagattttaaaactttgctctgaaagaccaacaacaataacctaatccaatatccttgtatatttgattctactgaccataacatttcttaatttctgcttttggcttctgtagcctaatatactaatgataataagtattagtgttgtattaggaggtagatgctattatccctcttgcattggttggagtctagttaggggatagaaaccatgctagttgagctgttctgcttatagagtagccattctttattcctttacttttttaataaacttgccttaaaaaaaaaaaaagaaaacatgctagttgtttgtacacagagagttaagctaaggaagtgttcatggggatgtaaaattaactaactgaaagagtaaaaagaaaactaaggaattggttcttcaatattagggtgcatccgaatcacctctggggcttattcaaacacaaatgactggcgccccccaaattcacatttctaatacgttttcgagtgatgctgatgtggctgttttgcggggccacgctttgagaaccactgctgccaggtactgcggaggtagcaactgcaggaagccaccacccttaccctacctagggctgatgagggaaagactaaaacttagatgtttggaggaggaacccaaggcctctgaggagggatctgggccactggtgctcatgtctctgagggggtggatgctgtgttgctggttctgcaagtgttgggagaaactacacgctggattcagctgctggtacaggaaggcacctttactgccaggatgaagaagcattgctggggtgatgctcacaggaaccacaagccaataggaagcccccaggcagcagatgggagggagcaagaccctcttcctcctccagccttagggtctccctctagcacacgctgttggcagagcctaccagggagctaggggcaaatcaaaaatgtaagtggtttgtagggtcccaggtctagtggagaataagtataaaagggtgggtttggaaccgagagctggttttacaaatggagaaacggaggcactttcccaaggtctctcatactgggtggcagggatggaatttgaacccaggtagtttggctgcagagcccttgtttaaccccacctcaggctgttggctgagaggccattctctctggctcaccttcctccctgtgactgttcttggcctccgttagcagtcgcttctctttccctgctcctcaggcagatgcccgtaggacttcattccctgcatcttctccctccacctctacccctagcatcacctttaggtgagtgggtccatgtctgtacctccacccttggctccttcgggggaaatgccaagcttggaaggccagtgatttcctggacgtttcacctggaatgttctgtagattcctcaaatatttcttccccctcggaactcagtactgtcagcctcaacagcttcctttcttctgattatttcagattctaaatctgtttttcattagactggcttagtagttaccacagccttctttgtacacttctctacccagtttatccagtaaactgtgattagagaagtgtgccttaaaaacaactgtgttcatgtcattcctcttcttccctgtggcctctgaagaaagctgaggcttctcagaaagcagttgtcttcattgctgagtgcttggaccctctgtggagcatgccctgtgtcctttccctaggtagttccagcttctccagccctgctgggctactcatggccttggcttccgtcctctctcagaccacccatggttgtttttgtcactctcatgtcagcaatgccaccatttccaccccatcagaactcttacctgtgctcgaagacccaattccactgccacctgctccatgaggccttccctgcttctctctcggggaaacatggtctcacctttctgtaaactcccctgggttttatctgtgtcactcctgcacaggcaaggccctctgcccactggaggctgagtctttgtctgagcagattcatatcttttctgtttctgaatttcccagggtgcctcgtgtagagcccttagtgccggctcactgcagagctgagtgtttccagttcaaatgggtgttcccagagtgggttttgtttcccatttaagaacagccttcctgtcatccagcctcaaacaggttggcctggactattctagtcttaggaaaggtggcccaggtgtgaagccacaggccacactgttgcttttagcacaagtttcacagcgaggaacagggactctgccctcagttttctctgttgggttactttcatgtctactcaattgagagttttaaatccttttatttctaaagatcgcctggttaacgtatgaagctttcttgggtccatgttggcctgttgtttaatgtttctcatttgcctgcgtatctggaaaaaaacagactcatttgcacagatagaaacaaaagattgtgcagatgggagccacgcatggaagggaaggaatactgatctccctaatgcatcttccttgcgaaacatggagctgctcaggaaagaaagggcccgtgattcaacagttggggaaatgtgggttcaacgggctcccttcctgcagaccttcacggagcctttgatatgtagtgatgagcttcctgaatcttgatctgcatgctgagttcctcagatgaggttaatttgaccacaggagtgtggttccatggaactagtattccttggaatgtgctttgagaaaagttgccataaagactatgagtgtcaaagggatgaaggaagcaggagttcaggctgaggatgagccagtgaccccctgctctggccgtggaggggagggcatcactaggtgaagcaagccctcaggaacaaatctgcacctgtgttctgagcccactccactcttgcaggccaagactgcccacaccacaccaatgcaatagacccagcttctctgcctctccagggaaagccgttagggtactgcagggagggggtcggtttcgccaaccaggctcattccctcagtcacctcccaaggatacagtgtcagaataacagcttctgaaatgagttttctccactcatgcaaattgctctctgactttgaacacccacgtgagtagaagcagtgttttggctgcctggttggtggaggaggaacatcacagggttattttttcccctagcaaatgcagacaataccctccctctaatcaacaggttcataagcgtttgtctgagaaccagaaatgaatttacaaggggctctctcctagccttgtggaattagagcagagatattgctttcttttcacttcagttaatccaaatgagctgagtctcctttctatagggaagggcaaaacaaaacaaaaacctaacccagcaaaaacaaggctttcttactgccaaactggggctccgaaaatagtttgggtcattggaatcatgaaagaaatagtgtttatataacctctctcttgcagagaacttgaaagtgatttcctttcgttttatgcaaataatatatgggatttatattacccactttgtcaaactcatcttccttgtatgtgtttggaaagcttattcactggtggtcaggcttcttgtttttcttctgggtagactgccttttagacaataaattctgaagtctttgttaattccgagctgggaggatacaaatggcggtccatcctgagtgtgggaaggagaatcagtttgaaagagctcttttatctgcactccttagactttttagtgttgtttcggttattttagtgtattgccagactcacggagaacttcgtttgtccaaagctccacgaaggctgcaaagataaaccaagctgtccatgtccttactggcagggatcacagagtctagtgggtgagagagtgacagataccataatacaaggcaagtaagtactgggtgcatgcaaagtgctttgggattgtaaaagagaaagagaaaaaacccagccaagtagggaggggaaaagctgccatctgagcttcacttgcaggctaggttacatttcagcaggcagaggcaggcaatatggccctgagcaagggaagtacagaagtgggaagtgcaggggacttcagatcacggggtgagggaggaggctcactgagagagaagaccagtactgtgctctgtggggccagctcatgagaccgcaaagatagtagcagctttgatgccaggctgggaattctgcctgcgctgttgggagccagtcacgtgttccacacaggtgagtggcctgttcagattctgtccctgtgtgctccatcctagtggtacctgggagttgtcatctccgtgcctctcttttttctgtccccacatctccagttatcagtctttctattgcacccaaaaaaactgcttgcctctctccctagttgtatgtggtccctgtgtcctcatcactcatccatcaagtgacaaaactcttctcttaaccttcagccttggcctcctctggtctaccctttccatgctgccagagggatggttttaagctgcactggccatgttcttcccctgctcaatacctggcagcagccctgtcatctccccaggaaagcctgagctccttggtgaggctgatgaggtcctcccaggtgcaggtgcactctccatgcctctgccttctcacgcactcagctttaaccacaccaaactggatgcacttcctctctcttgtctctttaaagggactgtgtcttctgcttggaactttccctttgtgaactcccatagccatccctcagccaacagacatctgcacgcatgccagctccctccctcccctacccggtctattgggttgcgtctccctccctctattctcatagtacttggtgccccctctgtgcacacagcccggtgctttatggttactttttgcctgcctgtccatcatgtcactagatggtgagttcctcccagtgcctagctctgtgccaggccaatgataggaccccaggaaatgtgtgtgggagagattagaaggagagagctggaaggaggaagacccatttggagcccagggcagcagccaagccaccttcatttgtcccgacgatcatgctggtcccagagttggcctcattcctccagagggtggtactaagattactggagaaaacaaccagggggaagctcactggtatataacaacatcagctcccttctcctcgtcccaggaggaaatgatatttccatacatcctaaacatccgcctccttgcagcatctgcggaagcttgcttgaataatgaaagataatcagcaatagttgaaatttcctatccttgggcaggtctttttttcctactatattatgtatttaaatacatagacatatttaaccccacctaccttttgggccaagtgtttatggactagacttgttcttccccttagttttggaggtccagtggtgagtacctctcacttttcagagccagaagtgctgcttaaaaatgtgttcagatcctggccgggcgcagtggctcacgcctgtaatcccagcactttgggaggccaaggtgggcgtatcacctgccgtcaggagtttgagaccagcctggctaatatggtgaaaccccatttctacaaaaaatacaaaaaattatctgggtatggtggtgtgtgcctgtaatcccagctacttgggaggctgaggcaggagaatcgcttgaacccaggaggcagaggttgcagcgagccgagatcgcgccattgcactccagcttgggcaacaagagtgaaactccgtctaaaaaaaaaaaaaatgtgttcagatcctgcaaagtgacagcacattagagctggcggtgtgcagacacgataagagggaagatcagatgtgctggcagagagctccaaagtgcccttcccatgagtgtctctcggttggagagggaacacactgccaggagccaggcagtgtcccgaggccttcactctcagtccgtgcccagagatgcagcccccttatgctaatttatgtgtcatcagagtcattaagggtcatgaagagccttgggttctggtcgcagctctgttgccaactggctgagtagacttccgcaagccacgtgctttctggggcccaggcagccctcatctgccaaagaagggagtcggatgaaatctccaagagtctctcctgcttcccacttccatgagtttatgaaagatgcagggatgtggtgttggcattggggtctgatggagcttctcaagggagaacatgcccctaaagaggcatgtagcagctggggagggatggaaggggagtgagggctggagactttgggggtccaggagcaggtgctcccagctgcttgtggcaagagaggaagggagggagacactgaagagaagagcaggtctgcaggcaaggaagaagcagccaaatggccctggggttctgaccatgagctttggaattccagagtggccagggaggctcctggcacggccagtccctcagtggacagaggccggcggggccagctggtacagcccagcagctttcccagaacctctgtgggttgcgtgcctgggaggactcagccagcactggctcctcttctgtcctcagaaccatctccaccttaactcctccctggcacatgcagctctttctcaattatttatcagtagcagcatccatattagcccactgtgtgctgggcacagtgccggacactggtgactgagacactggtgacccaacctttgctaagaaacaggacttggggagaaagaagaaaagcaacaaagtgggttatctctaagtccaagtatctcttggtgttgtagctcctgtgggcactgcaaactcatgtttttattatttgaaggaagaggaattagggtgagcaggagggtgacgagagggtgattggaaagtccagatgttgggctctatgaacaacttatgtctgctttaaattctcataggagactgaaaaccaagaatatacctaatggtaacaggcagtagaccaaagatcatggactgtggctctctcccagggcaagctctttagtctccctgatcctgaatttcctcatctataaaatggggatcatcaagcctatctggaagggttgcactagagatgcaggtgaaatcgtggatgtatgatgcctgccactcagtagatgctagttcttctttctcttgctgatttagcaacaggcttccttttaggccccacagagatctctcctttgttctcttaagtctaatatgtttagatctattgctgacacctgatgaaatttgccaagtgtcttgaagtggctacagtgccaaaaggcttgttcttggcaggtaccatatttcagtttctcagatctcctctggcaagagttctgcagacattctctaatcggagtttgggggctacttaaatgattagtcccactgaaggtagacctctgctttgaaaacagccctctgttgtccaggaagggcttgtgcatgcctttataagaggtcatgtaaagcatggttgggacagaagttgtattgggttcacttgtgtgtcctggctcctaaagcaaagggattatccttgccaaaggagaaatatttggaataaaataccatggctcatgtttcaagatatcacaggccgagaagcgaccatgatcttggtgagatgccctgatgtttttttctgtggggcacatcataaaagaactttggttaaacattttggcctgctcctcatttcccagctccaatcttccagattttctgagtagctgacatgccttctaggggaaattttgcattcttcacttcctctacctctctttcttcccctctgtttttttcttttctagccaggggcagcagcttagtacttggaacctgccacttagaatggctcagactccttggagccaaggggcacgctggcggtttctgccaagcacctggccagggttccggggtggggaggacggatgggaggtgtcacactgcccctcgtgggccattgcctcacagcttgcaggtgtcctggcgctgggataaaagggcttatccttgagacctcaggagcgtttctgccaagcgctcgcattggtcagtttattcggattctcctgtagaggggagttacctgcttcttcctatttctgttttctgttacaagacctggctagaggcctctctgagagcgcagtcaggcacaaagcccggcagaggcattggagaagacaggtcatggagtgaatgagcgaaggaactctgagattctagggtgttaactcttagaatacccagatcctacatagctgcaattcagcagaacattgaccctggcagccagagtacttttcagactagctgaggtgctggaaagcagcccaggaggacacttggggcagaggcagccagcctggggttcaacatttgtggctgataatagagacctcggataaatggaatatagacatgttacatctcctgatgcagagctcctgcagccagagggtcttggcctttgggggacctctttgggagggcctggggtcagatgggggtggacttgggcctgagtccatcagagaaaatgtggggagttggggtagagaccaatggctgccaatgctcacttccaattcaggaatcattgcgccttcctgcaggaggatggccaacgcctaatgatgatgatgattttttcaaagccttcacgactgctctaatgataggcatatgaagccacagttttcctccttcctgctgttcattcaacctttctagcctggcagctttgcctcagttttcctccctggatgatgaatccacaagtctggccagaaggaagatgagcattactctgaaagtcattttgtacttttaaaacttattttctttctctgagttctgtattagtgttgtaatttgctcctgataccacctaaatcagttgcgattaaagcttttctatctttctttttttgtttaaaagaaaaaaacagatttgctgcctggagttcacgtattaacaaagatgaaaaagatagtgtctgatttataatgtactgaattgcctaagtctttcatttgtaattcttgacagtgttcctctagtaaagcgaggcatcgttctgttgtcaggggctcagtaatcgccatgaaaaacgggggaaggatttgtgagacattctatatgagtaccgaaggtgatggacaagtaaaaatcaggacggcataaattactcagtatctttcttctccacaattattttcactgtggcattactatattggtatgtcctccgggtccctttaaggtcaagaaatcaggagataaaaaccttgtagcatttgaccagatcaatactgagggttctcaaatagatatctaagtctttggcagctgatgctggatgggcaagggaaaaacatagtttttgataggtattgaagaagcttcagcagccgctgagtacatggggcctctttcccatgcgtctgatgtgctgtgtgccagtctggggaggggtgagggaactccatttgggttctcagttttgttttgtttttttttgagacagagttttgctcttgttgcccaggctgtagtgcaatggcacgatctcaacctctgcctcccgggttcaagcaattctcctgcctcagcctcccaaactgggattacaagcacctaccaccacacccagttaatttttgtatttttagtagagacggtgttttaccatgttggctagactggtctcaaactcctgacctcaggtgatccacctggctttgcctcccaaagtgttgggattacaggcgtgagccaccatgtccagcctgggttctcagtcttttgtggaatatctttgttcttcctccattttccatcagttttccactctggggagatgagaattcgttaaaacagagtgagccagcgtaggatggggtagggaaatgaagcccactgtaaactctgtgggtgctgagaaacctcaggctcctaggtaaaaggaggaaatccaaggtggctgtccagacactgcccaactgtgccaccagaattctgagctccggccagcaggctctaaaggacaggtgggcaccttggagacgtgaggagcaatcatctttgcttcatattctacctgtggttgcctttcagcagttttgggaatgggagctttggggcattttatgtcctttgcattgtccgaagaaaggtaaaaggagcgattgctgttacactggggatttctgatctgtctctgataaaatctggttgcatagttgatcttcagcaaaagaggaagcgatgaatgaaattgctgtcctcacttgccacctccccttccttttattctttggtttttaagtgtggtgaaaatatcaataaagaggctggccattttggtcccagtcaatgaacacttgccatggggtagtccttgcccagtggagatccagcccatatgggcaccgttgcattgcctgtgggtcataatgttttaaggatattctgttcagttgccctctgggtccctccaactagatgaaggcattctagattgcaggggaggcgggaaacagtcttgagctgcgggatgatcttgtctcctagtcacgagaaggagtattggagatcccatcatctcatctgcctgtggtcattattactaaaaccttcttcagctgcccaaaccacagtaggaggtagccttgctcttcctccccttggagccattttcatgtgggcatgaaagtgattgacaggctgtgaagtacctctcccaccatcacccaacactgtgaggtaggcggagcagggaaagttttaattaccattatacagatgaaaaaactggccctctgcagaagttaagtggtttgcatgagcctgggagctggcactgcaagacaagtctacctgctacggacagagtgctcttgtaccctcggggttctgcctctggtcactctctacatagcagaagctccactggcacttttgtattcacaactaccgggtgcgataaggcagtgagggttattatgataccccttttcacaggtaaggaaacaaggctcagagaggttcaacaacagagtcataattcttcttgttggagaattcattttgttacatttcattcccaccatctgcagtaagggagacccattaaaatatagtatcctgatttttaaagagaaggtaacattaaggccaggaggtttgggatttgcccaagttcactgtgggcttctggactcccatgcccaacagcctccatgatgcagaagcgtcccgcaagagcctagtgttttgattcttttttggtgccaggagacagactgtggacctggagtgggtttgggggctggagaagtagaggaggtggagtttctagaagaggggtatattgtgggggtaataagaccaataactacataaggacctgcgtttggtcttagcagtgaaaattgcatctttagccttatagagaatgttgttttcctccataaaataacctgctttgagcaccgctgttgtgctgggcaccattccagttgcttttgcatctgctctttaatttaatcctctcagcaatgctatgaagtaggtacctgcctcttttttcctcagttgaggaactgaggctcagtgagttgaagaaacttgtcccggaccacacacctggtctatggccatggcacgtggtcattcagcaaacgctgaacacatgctgtgtgtcaggtaccatgctggacaccagggataaatcagtgaacagaacagaaacgaatcccggtcatgacagaactcaactcaagcggagggaggtataggataaacagcaaaaatataccaaaaaagaaaattacattgcacaattagaaaacggtaggagccacttaaaaaaaacaacagtggaacacagggtaaaggagattaggaagtacctggagtgggttgcaattttacatcagctgaccaggctgggctgcagggagagggcttggaggaggtgagggagtgagccctacaagatgtctgaactgacgctctctcttcagaaagaaagggaggcccagcaagtgggaatgacttggccaaggttacccactgagttaatgtccaaaccgggtcaagaacctggggatcctcacagctgcctttgaaagcttcatatgggccgggcacggtggctcacgcccataatcccagcactttgggaggccgaggcaggcggatcacctgaagtcaggagttccagaccagcctgaccaacatagtgaaaccccgtctctactaaaaatacaaaaatcagccgggcatggtggtgcacgcctgtaatcccagctactcaggaggctgaggcaggagaatcacttgaacccaggaggcggaggttgcagtgagccaagattgcgccaccacactccagcctgggtgacagagcgagactctgtctcaaaaaaaaaaaaaaaaaaaagaaagctttacttggcttctctatatcccctgaacatctctgacctggctctcttgatatcagtctccatgtccaattctccatgtctgccttccagcctcttccacagccttcaacctttgtggcattgattcctggtggtcccatcctagcccccaaaccttctctgtcctcaaaagtcccatctctcttctctcttcagataaacgtacatctcttcaccccagcatcccagcgccctgagtgaggaattaatgcttttatatttgaagagatcggctgctgtcatttttgatatcttctgtttttgtatgtgggaacgcagagcacaattagaatacagttatatatcctcatagttattgaagcttggattaacatgacataaagttttgtctagggagtcttttgctatggctcagggagcattttttgtgacagtaataggctacagttaatatacttgaatgatactagaatctgtgttataaggcagaacaaaaggggtttatctgaagctgaattacaaaggtggaattatcactgcgaatgatccacagagatctggggcttaattattgtcgcttgtgtcatttcggcataatatgggtagttactggagcagagtagaagtgcgggagggccagcctgtcaatcacccggtggatgccaggattcccaccccttacacttagcgccacgccagccgtgtgccctacagagccacaggaatggatccctttggccatctgtggctatgtggtactttcagttttcttaatgttttaatgactcccctgtcctacctccagcccaatccccctctccccacttaggtcctttgccctcttggccctgtcgaaccttccaggaggctgatgaacggtctcatacactgatggcattttctcagcccggtgaggccgccaccaccttccagagcctaattgttttgacaagcgaaggaggcaagctaatgtgctctgtcagccatttggtcacatttggtcaaagccaggtgtctggctgcaaataggtgcactcaggtaaaccacatccccgtgtgctccgggaggacagagcacgcaggaggcgggagtgttgcgggcagcccttccccatccctggctccagcgcattcattctcctcccaggctccagtcaagtctgagggtgaagggtgggaacaagacagttcagcacctgaacagggcagggcacccaagggcttttagaaatgctgttagatttatagggaccatcatcctcttcttactatttttattatcatttttcattatccacctgctaggtgtacaattacaacttgttttgttggtggctaaattcagctgtcctcctcaccttactgttaaccaagagaggtatggccattttaaatggccaaagtgtttctattggaccctttaatttttttatttgagatggagtttcgctctcgttgcccaggctggagtgcgatggtgcaatctcagctcactgcaacctctgcctcccgagttcaagcgattctcctgcctcgcctcccaagtagctaggattaaaggtgcctgctaccatgcccagctaatttttgtatttttagtagagtcagggtttcaccatgttggccaggctagtctcgaacccctgacgtctggtgatccacctgccttggcctcccaaagtgctgggattacaggcatgagccactgcacccagcctattggacccctttaaatgtgactttttctgccagacttgttttctgagaggtcattgcactggtgctttttgaaaagctactctgagtgaccccacgtataaagcgaggaaagggaacaggactttggcaggcagctgtgtgtggcaggaagtgaaccaggaaggtgctgggtgtagtcttctcccaccctccagcagtgctggggagctgcgcttgtttgggaacagagaggttcaggaatgtcgggtctttgtcaaggttacatggctggaaaatcaaaaagacagctacgtctctctatgtctgaaggccatgtttttcagctagtcctgtactttttttaaagtatggtcttctaaatacctcatcagagatgtctttgggccccttatccaaaatgaagattcctgggcgccaccccaagacaactgaaacatgctttctgaaggagcaagcagcttgggctgtgcatgtaacaagtcaccaggtgtgactgatgcacacgcaggtagttgggggccgctgcactgtccggacaagctgatgacagcgtcagccctggtgttcccatagatgcctaggtattagtttgaacaccacatgtcctcagatattcttcataccaagagagctggtccttggtacattataccctactgggctggggtaacagaaagtgggagccatgacctcaaattaaattagagccaaaaagggaacatgtgggattttcttcacatctcccatttaataaatgagagaactgatcctgcaagtaagagaattccatgaaggacatacattcacagcagatctggtcctagtagctgttacccccgctacccttaaaaagtaaatatctatcaccacttgccttcctattgctacgatgatttaaaagaagagttggttttaattagaataaacatggtatttttcttgctgcaacaaggccttcaaaggggaaaaaaatctcaataccccaattatgccaaagcgttcccagtcctatccaggagtaattaaaaaatacagctgacgcttgttctcttgcttgtttttaaatgagtagctaagtatctgtcaagatgatgagcacctaggccgctgacggccttaccatctcaatttgctcccaggaactgcagagatgagaacacgaaagctgttgttttgaactgtgaggtacctggctaccccaggcacatgcattttgtggttggtggagatcatctctccgaccccagtaccaaaatgtgggatggaaggccaggcctcatgtccacattcttatgcctggaacacatctcttctttccctatgggcagctgaagtggcttcttcctgtgccgcgcggggagctcagcttctctgcagtacacagcatgttttgaggatcgttgggtagaattaggttggctttgttgggggaaatcccctagttgcaattcactttttaattagttcatggaacctttctttctttttttttctttttttaaattatactttaagttctagggtacacgtgcacaatgtgcagatttgttatatatgtatacgtgcaccatgttggtgtgctgcacccattaactcgtcatttacattaggtatatctcctaatgctgtccctcccccctccccccaccccacaacaggccccggtgtgtgatgtcccccttcctgtgtccaagtgttctcattgtggaacttttatttctaaaatatgcccccaggtgaattgagaagtcattttgcatattaacaccatccatttggtgacaattgggctttttttcctcaagctaagggcaaggccagacgcggtggctcatgcctgtaatcccagcactttgggaggctgaggcggatggatcacctgaggtcaggagttcaagactagcctggccaacatggcacaaccccctctatactaaaaatacaaaaattagccaggtgtggtggtgcatgcctgtaatcccagcaactcaggaggctgaggcaggagaattgcttgaaccctggaggtggtggttgcagtgagccgagattgtgccacggcactccagcctgggcaacagagtaagattctgtcttaaaaaaaaaaaaaaaaaagggcagctaagggcaattctgtatgcattcttctcaccccacccacaacacacatgtttttctaaagacaaaatcaagggcagacttgaaaaggaaataatcataaaagtttctatagcatttggagttcttaatatttacccatcagtttacagcatgtttttatatatgtggtgttccggttatctattgatgcataacaaatcacccaaaaacttgttggcttaaaacaacagcaatcgttatattatttctcgtggtttctgtggagcgggaatttgggcgggactcaactgagtggttcaggctgggagcatctcatgaggttgcagtcagacatgaggttgtagttctagtggctgccactggcacaacaggggctgacgaagcatctgtccaagggatctcaggacttctccccatggtctctctgcatgagctggtttgagcttctttatatcatggctgcctcaggcagtcaaactccttgtacagaagcttagggctggagcacaaatgtttccacagacaaggcagaagcgtgttcacttttttttttttaacctaacctcaaaggtcaaacaacacaagtgagtctcaaactctcaactggaatgaaggggaggggacatagagctcacctcgggattggaggcgtattgaggtcctatcgtagatcgcatgtggcacgggggagatattgtggccatcttaggagaatacagtctgccacatgtggtcactctcagacacgctcaggacgggtaggaggtcttattatcaccattttacaaactggaaactcaaagccagagaggtaaagtagtttgcctgcagtcactcagatcttaagtggatattagaactcatatcctgagggatgtgagaaaaggggaaagaaggcagcaccaagtagcttgtccaggtgacctttgggggcaggtgggacttggtggctctatacctcagatctctcttcgccaccatatgaaatgagttgcgtcttttttttttttttctctttctctctcatatagactcttgggtgcagggagggaagagccaggtggggtgggctagcaagaggaggagcgagctctggaggaggaggttggacagttgcccgcttggtagagcagctagttttttacaaccactgtcaggagaggaagggccatccgggtctgtagggtgtgtgtgttgaccaggctttacccagagcactgtcctgtctcttctgaaggtcagggcactcaatgaaggacaagtccagctgtggcctttaaattagaagactagccaggtgtggtggctcacacctgttatctcagtgttttgggaggctgagccaggcaaattgcttgagctcaggagttcgaggccaccctgtctctaccaaaaaaaaaaaaaaaaaaaggattagcaggggcatggtggcatgtgcatgtagtcccagctacttgggaggctgaggtgggaggatcacttgagtccaggaggtcaaggctgcagtgagttatgattgtaccactgcagtacagcctgggtgacaaagtgagaccctgtcttgaaaaaaaaaaaaatgaaccaatatgattaataataatggcagcatcaagagcctgtacttcctatgtgtttccatgtgtgtaaatgctctgtcacaccgtctcatttcacctcatttccccataaagaacattctattaactggggttcagagagtaacttgttctgtcgctcacccaagatcgccgtgtggttcctgagtgtaaggtgtgaagccaagtctctgtggccctggggcccgagccctcaactgccctgctagggtccaagctgaccactgcagggccttagtctggaggaacggcttgactccggacatctgcaggagtgtttgctgtgttgagttgagcccctctgccagacgtgtcaaaacaaatgcttttgtgtgtttactgcctcacacgctcagccagaagctcctgttttatcatctagtttagattgaggggaagaggcttcatcagtaaggacctgtctcactcttcatcccacggccctgggccaggccctgttagctttcaagaaggcagtttatccctcaagggtggtcctgcctccaggctgcccccaccccatccctgtggttctgcgcacagaatattgttagatttgatttttccaagtcgtctctctcagtgcctaaaagagattctggcgtgctcagggaagttttttgaagtgaccaaatgaacagtatgtgtgctgattcatctcccctcactactgtcagggtgaaccaagttcagccgttggcaacgagacggacctagaatagcccctgctcctggagattttattcatagacccttcaacacagcctgctcttatagacacagtcattacatgtcttgggtttttcaggaagatttagattttctgtgtcagatgatgtatttaagataacttcagtcactgcgtagctctgcaggacaaccatttattacaggtctatttcaatttttgaaacttatagtagagacagttgctaagttcaagctctcagagctcacctccaggttgcatagccagtttctaggagggtcctgggtttcaagagcaagagattcccctcatcctccactcctgggctataggcaggtacagagtacaaggctcagaagggcccaccagcgatgtggggctctccaagggtcctctaggaaggagaccccaggggagagagaatgagttggggcaaccaataggaaaagggctaagaatcacgttaacatttatggaataggccacgtgcacctggcatttcacacttggcacctggttctttaccacattaaaagatgagtttaacttttctcatcttacaggtgacgtggtacagagtttaagagcatgggctctggggtccactgttgggtttaaatccaggttcttctcctcataagcaggatgaacttagccaaatttctcagccctctggatttcagtttcctcattgataacatggagacgatgataatagtgcatcctttgaaggtgtaatgtgtgaattgaactagataactttgtgaaatggccggcatagtgtcagatctacagtaattgtgtaataagaattagctgctattattattgttgttgtttgagggatatggacagggaatggagaagatgactctgagatatatatatatatatatatatatatatatatatagtcatcattctgtcatgcaggaaggtctgggctctagatttaagccttctagcatctaatgctgggtcactactgtgatcagaggtcctgatgaggctgtttgcgtgtttgtgcacagaggcgcatgtgttgggaaccgaccacctacccttccccagcaccattacatacccaggctctgctctgaccttacagcccaccctccatggcccccaagtggtcttgggagcagatgcacagctggtggattgggcctgggccctggcttgctcaccaagccctgagcttctgtttatgactaattgctttgtttgttctgtatgagacacttaattttttttttcagtgatttactcctctttgtaattaggtgtggtgattagaatcttgttcctattacaatggagttttccttttaattcatgcacattcaccaggcctatctccgtctgttccattgattgtccccagttggcttttcccaagctgtcatataaatcacagttcaggggtggcttagagactgatacgagtccaaggaatgaaagagagctgatggggagttttgttatattcagctacccaatagtgatacatatttaaggatgaagtctcaataaatcagggcacaaggagttggcaaattactttaataagtgttctttactatatcttctgcatgtgatttatttttttattaaaaatgtcattacacacacatatacgttttgctaggaaaaggtctgaaaataaacactgaagtgttaacagtgggtgatttgtattttcttctctttgctcataggcagtttctgccatgtatatatgacacatgtattaaaaaataagaggttttgcaggccctcctttataacagattagaaacagcacatttgtcaactagcccaaggtcacttcacacatcagcaaaagactccaggtctttaaagttccagagcaattgctcagtccccagagctgacgttcatccgtcagtcagtcagcaagtagtcattgagtcctgggtctggggtgaggggcagagaaggcataagatgtggttcctgttcacaggtgcttatggtttagggagagagttgtttttgtttgtttgtttgtttgtttttgagacagagtcttgctgttgtccaggctggagtgcagtcgcgcaatcgcggctcacgacaacctccgcctcccaggttcaagcgattctcctgcctcagcgtctcgagtagctgggactacaggcgtgcaccacgatgcccagctaatttttgtattttaagtagagatgcatgttggtcacgctggtctcgaactcctgacctcatgatctgcccgcctcagcctcccagagtgctgggattacaggccatgagccaccgcgcccggccgggagagaggtttttgacagaaactttctcttcccctgaccatggctctgacctctcaaattccccagactttggtttctcctccacggatcctcctccttcatgatgctgtgaaggtggccgatgccagggcattgccctctcggttccgcctcttcctgcagggcaccctcccttcccgtggtctcccatccagcctccttgttgctagctcttgaggctgtgtgccctcccgttatgacctcacaaggcagccccccgggattctcctcatgcctttccttcagttttcccttctgtggaacacagacaaagtcatgttcctcctaagtaaagggctggagagaattcagtggaatgacagaccagtggacttgactgggggtgtgcgtccgaggggacctagatgtgatgctggaaggcagggtagcttgcctcgggccatgagtgcttggatatttccctgtgggcagtcggagacatggaaggttttcagtgatccttcaggaaaagtaaccgggtcacagtcagtgatgccaggaaggtggccatcttgtgttaggtcacaacttacagtgacaaggttctgaagcaaagagagttgtagaaaaagtggctgggcgcagtggctcacgcctgtgatccctgcactttgggaggccgaggcgggtggatcagctgaggtcgggagttcgagaccagcctgaccaacacggtgaaaccccgaatctactaaaaatacgaaaaattagccgggcaggtggcaggcgcctggaatcccagctactcaggaagctgaggcaggagagttgcttgaatctgggaggcggaggttgtggtgagccgagatcacaccattgcactccagcctgggcaacaaaagcgaaactccatttaaaaaaaaaaaaaaagaagaaaaagtaaggaaaggggagaatggggggtcccatcaaaggaagaaataatagaatgggatggggtagcttggaagacagaggaccgggcaagagtgtaaagctttcaactgcaggaggttggggtcactagttgaaatggagtctgggggaaggtgtgtttgtcattgttaagatgtgctggggttggaggtcccagaatatccatgtcacgggaaaccaacagcaaagaagtgagcctgctgctctggggacaggcctggcaacagagcacagagaggcaatggctcttcttgccaccttcttgcataggggagagagctcagatggcgagggtgggggccatggatcaggtaggatggatgacgccctggagttttatggggtgagagaagaaaagggagcctgggagagttacagagagggggtagagcacctggggcctagaaaaccccagagaaagcatggacataagggaaggttgggagtttaggtatattcttacattttccttgacgtgttttcctatttaataaaaaggggtggggtcttccagacttactgaacaaattaacaaggaaaaagctcatcccctaacatatgcaggtattccttgcttttagaaagaatgcctcaccagagttgcttaagcagaaatgtgtacaacttggtaggctattcactcttttgccaggggagtaaaaaccaagagagaatgaaatttcaggttaaagctatgccagtggttatttggtatggccgagtgccatcttggtttgggggtgcggcggggggttgtgtatatattcaagttagtatgtaagtcagggtggagtcgggggacaaggtgaaaagcatatgggaaataaaagcagtttctctgaaattctgtggctgtagatttctttctctggaaccaaagagaaactttaatgagttttcctttgcaggtaaagcagttttattctgtagctgagacttctctaaataaagcagccttccttctacctccactgctcaggctctcccttcctgatggccccctccagactctctttaaaacagagtttcatgcatgaggaagcatcataatgtaatactcatcttatctccacacttacccagcaggcacttacaaaaggacagtgggcaaaccttagaaatctctgtggcaagcggaggtgggacgttttctttaaagacgccctcacctaggtctgtccagggcaggaccctgatgggccaattagccacgatcagggtttccctgctccggctctttctctttgaaaggcgtgggctcatcttcctttacatttccaaggttctccacttgtctccctcgtgataaacagtgtaaggcggagtgtctaaaggactcggggaaaacctgcggggttattatggctcatttggtagatgagagggatctgtaattttccgtggtgtatttgtatgcacagagatgtgataaagatggcttgtagcctctttcattttccagatgtctcacaagtggataaacatcgcttctttctctggctgtgggtctgctctttctggtgtgctcctgatgccatgttccctgggaacgttcgcagtcatctcaccgtccccgagaacagccattttgtcttggcaggtcttcccctggccttccgagggagtagggagaaggctgctgtcgggggaggccatgggagtggagggggctctgcctcgtcttccagaaccgttcaaacatctggatgtgtttagcccttttgattcgagttgagcaaatctggagcttgctttttgtgcctgttgaagggcaaaccttcctgtgtcttcctccatgtacagactgtggggacagccagggttagacagggcgtcttgggaggggaaggacttaaatctcatgaagacagatttctgacagctaggaaatgcctggaaatggtgtgtatgttggggtcagggaggatctgtagggtgattttcaagccagtgcaggcccagcccagactcacaaacctccctgctgcttggttaaacacatcttaaagatgctaattttgttgtacattgacatggtgaatgttttcctagtgttgaatccataatgtatttggtatgaagctataaaaaaccctttcttatttccctcccttttattttacctccaagatttgttaaatgaagaatttgtctttctcaatctatctgtttctctgtgtgtgttggggggggggggtgtaaatctcttcccattggtttttgtctttgtctctctgtgtgtgtgtgtgtgtgtgtgtgtgtgtgtgtgtgtgtgtgtgtgtgtgtgtgtctcccccacccccgacaatgactaagaagcattgagaactgggctttttcctacagatgcagtgtgtcttcttcaaagtgggagtctgtgtacttcttccaaagatcctgcctttgctctgcgcagtttcaaagtgttcactgtgaactcatattcagactctagcattttcttctgaatatcctcactggtgataaatctttggcctttgaaagtggatgtgatttttggaaaccattgccagtcttggttccaaatgacttgtggccaagattgattatgctgtttttggaccaaaatgcaataggactataaaataatgactagttgttttgcatgagttgggaactgactagaagggaattccccacccccctgacccccgcctcaccaaagtttcaagaaaatatttcaagtcttagtgaataaagacagggccttccatggtgacttctttgaaggggatgatgaccatatgacgtccactccggtgtatttgtctatcaaacaacaagacagagggtgtatttttttctgcttttaaatttgtaggacgggtcttgttgtattgcccagactggtgtcgatctcctggcctcaagcgatcctcccacctcagcctcccaaagtcctgagatgataggtgtgagccgccatgcctggcttgctgcattttctttttaatccttgctgtgcattagatgtggcaccaagccagctgatgctagataaagggccagggtcgtttatgagttagtgtttagtgaagacctacttcagagcgcagcagcagcaggcattgcccttttaaaactcctgctgcaggtcagcagcagctgtgtctgggagctcatggccaggacagaggaaagccatcctgagtgcttcgtcacccattcccttgcctgtggcccgctattggctggcagctctggacaggccattctgcattgatatgagacccccacctcaatgccacacactgcaaccacaccaccccttcctctgctgcccgtatccagcgcagacttcccggacctccagcccctaccatgtacagaatttgaggcatctacactgacagccctttctttccctgtcctgcccacaggaaaatcaacacattttcttcactaataaagtgaagattcaaatgacaggaaccttaaatctcattttaaagtgatgaatacaaaatgcatttgaaggctaaagtttagggtgctccaaatagcttaaaagatttgatgctggctgggaagaagtctggaagtgtttctttcagggagcaaagaaaagccataccatgggacataagcccctctttggaaggcctcttccaaagcctatagtttgcccccagaaagtgatgttttggttcagatgccatcagatgtgtgggattggcaagacatgggaaacagagtgcagctcacagatacgcgcgtgagcccggcaggcctggccaaggggagataggaactgggagatgtagggcacctgctgatggcagacagtgggctgtgctgggaggcttgcacctggctggataaagtgctgaaggagcgtgttcttgcacgtgttcatgcacccatggtcagaggccacaaggctgttccgggacccattcattagaatagagtcctcaagtcctaaagtacagtgtcatcttcgatgaaaaatggtttctgtggtccaagtgagaggacccctgagtcagatcagcatcgagtcattgcagaaatccacagggatcctcgggcagccctgcctccatcttcccagtctgagagatggggcaaagtgctgcttctcaagggttttgaggattaatgagctgacatttgaaaactgcttgggagacgaattggaagtgctaagtattactatttcatgtggaagtctgaaaataactgcaccgaagtgttctgataaataactaaattgagctagtgagggggaaatttcagccgtctagagagtgtttctcttaaatattttttctctcaagtggaaaggagtgagggggagagtgaggaagaatttatccagggagaatttgtgtgcgttatgccgcccacaaatggaagaatattgagtcggcctcaccagtctggcgtcatcttggttgcttgctttttgttttgttttgtttttgagacagagtttcactcttgtcgcccaggctggagtgcaatggtgtgatcttggctcactgcaacctccgcctcccgggttcaagtgactctcctgcctcagcctcctgagtagctgggattacacacatctgccaccatgcccggctaatttttgtatttttagtagagatggtgtttcaccatgttggccaggctggtctcgaacacctgacctcaggtgatgcacccacctcggcctcccaaagtgctgggattacaggcgtgagccaccatgcccagctggttgcttgctttttgctccttcttcaactccaaacccaaggcattgccaagcaaatgcagtccccccatgattaattcagttgtctctaccacatgacaccttcacaaggtcttttctgctttttcaaaactttcccatcctttacgattagtgtcattcctgaagatttttggccaaatggcagtttctccattccttctgttgtagcacctgattgtgccacaatcagtcactgcatttgcccattggtttaaatgtctgtttcagcttgcctcttcacctggggcatgggaggcagaaagggtgcatttttcatgtgtgctgggcctgccacgtatttgttgtcagtttgttcttaattgcgctgtttgtcacaccaccgttctgccccacgaggtttccccatctactccttcctctgtcttggtcccataggactttcagccttttgtgtggctgggttttctgcaggcctctttgggggctggtatggatggccttgggtggggagggtgcctgggcccctgaggccctcttgatgaggtgggatgttgtgaatggtggccccatccccagggagccctctcgtttcttcctaccctgatattttataacaagatgctcataagcctttggttccactggcgtgagctcctaaataatgttgcactcctcttgtttttttttttgtttgtttgtttgttttgtcttttgtttttctggagacagagttttgctcttgtcgcccaagctggagtgcaatggcacgatctcggctcactgcaacctccgcctcccgggttcaagtgattctcctgcctcagcctcccaagtagctgggattacaggtgtgtgccaccacgcccggctaatttctgtattattagtagagacagggtttcaccatgttggccaggctggtctcaaactcctgacctcaggtgatccacccacctctgcctcccaaagtgctgggattacaggcgtgagccaccacacccggcctcctcttggttttaaaagccatgcgagttctaaagtctgctggagctggccaaggcagaacactcatctggaaacaccttttagaaaataggcttatggcacatttttgtgtttctctggctttagtccatggcacataaactggggttgggagcaggcatttaaatccccagggctagctcttgtcctgtctctgcctcgctgtatcccgctctctggaggtgggagggagctgtgcctgccatgcatccaccaagcagatgcttctgtccctggaatcccagctttgcttggtgatcagaaactccaggggtatcagtcagtcttgaccctttggaggaggtcaccaccacatccaggcagggacagcgatttatgcttttccactgatacctgttctagaaccagagggggtcagccagcatggtgcactgagtccccagagcagggtcccaggtgcagcctgaaggatggaaaagacatgggccctgccctcagggagcggatgctctggcaggaacttaccatggtcatgcagacgtcagggtggaacaaaggaaggcgcattaataaaccgcaaatgtgaagtgagtagaataaaaggtagagtggcgacccacccgctcaaatatattgagtagcctctccttccccttaccgccacccaccccacacttacccagagacacagagaaggttcattaagctggaatagtcatctttccttcctgcgtgccttgagactggggctcctcggctttcgagaccatctgggctcaagtcctgctggctcagaacgcctctcatttgctcctggagcggggtgttgccctggggaggcaggtttctctcgtgcgtacggatgttgtttcccggggttgatgcagcgtactaaccccagctctgcctctggcctgctgtgtcaccgtgcacagcagggttgattaagcccctgaccccttgacctcagttggcactgttggatgtcccccaggctatttggcaatggggtattggtttcagcagagactgaaggtggtctctctgacatcattttgttcccccaggtttctttctgaaaagccagaacctcaccttcagggtggaggcccagccattccgcagctcacacaggccaggcccacacagacagctgtgctttctgcagtttccctgccctgctcccgtggcttacattccactccagacacacacacctgctgctccattaccaggtccctggtgcccctttgcttagaaaccacctcctgccatttttgtgatgaaccgtctcccccagctaagttagtgtcatttttaccctgagtattcagagcccttgagtgcatgaatgaatgactaaaaactgggccttgacagagtgcctgtatgtgcgctgcatggggcctgcacagcctagagcacttatcacgtatcctgcactgatggcgcctctgtccccatgaactcaaggacaggaatcaagtcttcctcatttaaaaagtctttgggcctaatatggtaaatatgagttgattaattttttttttcaaatgaatgaatggattctaaaggtagcaccactgcctctgacaaacttctttttaagttaagggctgcccatttgctgaacagaaggagctcattcagcccagttgttagggcattaagtgggcttagggtaatagctctgaagctgctgtcacctgttgccatctggccagagtagcctcctcaggtaagggctgaatctctttgctatgcaggatgacacagggggtcctcactggaatagaggttggcctcagtgagttaatttcctcgttgaacagaactcagaggccgcagagtcttagttaagacttggctgtaaatcacagaaaccatctcatgtcggcacaagcctgtctgtccctctctgttgcctggttttccatgcttctgcagccttgtggcaggacacggctgcctcccatgtgggcagcatgggctggacagatagatgttagagaaagtggccattgtgtctcatcctgggtactccttgctcaggtgaagccagccttgccactaattttaacttcacttagcatcaacatcctaactgtagaaagagggaggtcctcagacatgaacaatactagatcttctgaccagctcgctgaggatgtaataataatggatggcagctgtttagttcttcttatgtgccagaatattgcacatgaattagcttcttcctttttttttttttttttccttctgagacagagtctcactctgtctcccaggctggagtgaagtggcatgatcttggcttactgcaacctccacctcccgggttcaagcgattctcctacctaagcctcctgagtagccggaattacaggtgcccgccaccactgctggctaatttttgtatttttagtagagatggggtttcaccgtgttggttaggctggtctcaaactcctgacctctggtgatccacccacctcagcctcccaaagtgctgggattacaggcatgagccaccacgctcggctgaattagcatctcttaatgctcataacagcactatgagataggtaccaacttgaagtgaagtaacagaggcacagaaaggttgagtaatctgcccaatgtcacacagctaataaatactagagccagcatccaagcccagggagtctagctctagagtttctggcctctcccattagtctgtactggtgagctgggacctgggtctaggtgccctagcaggcactgtttgtggacacatgggtcattggcagaagaactgcaatgccttttataaatctagaattcgacagtgtcaccaagcagatgggattctgcaaaagacaggactatatgcccatgaccacatttgccatcatttgattttaaattgacagcagttagggcggaggggctccttcactgcagtccctcagggagcctcacccccctcccgggctctcaaaccctctggccagctccttgtgcttctcctgtggtgatgaagggcagtttcttgagtgccacatagttcctgagatctacagagacatcttgaccttggaaattcctatcgttcttagaaaatccctagttctggagctaaagtaggaaaaattatagagctgagtagttgaggagcagtttaattaaaaacgacaaaaaaagaaatgtaaatgaattaggcaaaaatcttcatggggcatcattattggtagaggaggaccctgagaggagattaagatttccttttatttatttttaagttccattgtaattgaacccttaggcttgagagggtaaggattcctcacacagtctgatttcaacaagaatttgtctttgttaatttatatagggaagtgtagtaaatctaccaggaacaggacgttggcccctgtactatttcaagggggtcttgagagtaatagcgcctgacagttttccagcagctaagggatttttttttctgcttcagaaagcaaaatgttgtatgagttgtgcaaaatgtagaaatgatttgaagaattagggtgcagcaaatagtacagttttcagcaaagcactgaagacttcatcaagttataaagttagcaagtggagggaagacaggggtggaccagtggggtacagcacaggtgtgctgtgggcctgtcattcttgtttaatttcctttttccctggtcccaatttgaattgccaaaatatgttagattgcagtgcattatttcatttgcctgctttgtaattcctctttacctcaaacagatgaaaacatggcactaaagcaaattgacagctcttgaaatgagaaagatctttatccttcagagtgttgatgtagaaataaatgaaagaaaaacatacttgttgggtcttgaagcagcttgaattgatacttttttttttttttttttttttaagggaagatatgggtttttccctctccgttcttttttcccccttagggtgttgtgtggctcagggattaagtaggagggttggttattctgtcaatactcatttacaaagatctgagtcatgatttgggtgtaaggagtagaccaaaaatttccaacctctcagggtcaacagaaggaatgccgagtcctcaagttgacttccttacctcaaaaaatctatcaggcaccatgggtaccccaccccaaaccacatatgggccaactgaaatgtcaggcctgcttgccttacacagagcaccccgacacaccccatcccagccacttcacgctgccaaaaagctccagtgatgatcaggatgaatattgataaatgattttccatacttcaaaagtaagtagtttggtgtatgaaagatctcaaaacatttaaggtctgtgtttcaaaaattaaatgaaagacaggcctaatggctcaaaatagaaagattggaaaccactgggtttgatgctcttttttatctgagtctattttgttttgttttgttttgagacggagtctcgctctgttgcccagactggagtgcaatggcatgatctcggctcgccgcaacctccgcctcccgggtttaagcaattctcctgcctcaacatcccgagtagctgggattacaggcgcctgtcaccatgctgggctaatttttgtattttttagtggagatggagttttgccatgttggccaggctggtcgtgaactcctgacctcaggtgatccatttgcctcggcctcccaaagtgctgggattacaggtgtgagccactgcacctggccttatctgaattcttttctttatcctccaaaatcttcctgaaactcaacagtacgcacttattggacgcttatttttgtattaatccctctagtgggcgctaggtagggaatgcagagctgtatatgaaatttcctgaggactagggagaggaagcgatgggggagtgtggaccaccaattcatgtattcatgtgacagaataagatttcagagttgtgtatgccagcgccaaatacaagaaacagataagggatagatatttctactgtatgcctaccttatttatgcctactttatccaaatcaacagaaatgagggcatagttgtttgtattataaacagatctgccatggggtttcttgaaatcatgagcccccttgtggtttctttttattattattatacatttttattttaaaatagtgtaggactcacaagaagttgtaaaaataggacaaagagctcttgtgaacccttcatccagcttcccacaatgatagtactcccataaccacagtactttgttaaagccaggaaaccagtgttggtaccttatcagttttcatgtgtatttgtgtgtaattctttaaaattgtactacctggagatttgagtaactatcactacaatcaggatatataatagaactgttccatcaccccaacaaactccttgtgtttctccttaatagttacaccctggccccactcctaactcctggcaaccactgatctgttcctcatcacaataatgttgtcgttttgagaatgtcacagaaatggagtcatacagtatgtaatacagccttgatactgactttttcacttggtatgatccctctggtcagttgtgcaccagttgtgtaccagctgtattccattgtaggaatggaatggaatggtttgtttgtccattccccctgtgtttccaaaagatggtttatttgcatgcgacccattgcatcacagtacatcaagccgggtacacttacaaagttaaacctcactcatccgtactgatttcacaactttgtagttatcaatacaaagtctgttatcccattatgcagtcctcatccaacagatatttgttgagcatctgtgcatgccggggctggaatgcattctggtaatagcatagggtagtcatttgccacaggccaaatgctttcctgcgtgttgtatcaatagtttctacttttcaatgctggggtgaaggttaacagtgatcacgtgttccttttacacacaaggaagctgagctgctttggaaagccatgcccaagatcatgcgtaagtggaaatggagtgggatttgaacccaggatgtgtgatggcatgccaagtttcttttattctgtaactgtggcttcaactgtacccgctgaattgcttacagccagtttgctcctctagaaaatgagtggactggactcatatcctttttatcctctctgccttgaagagtttatgatcctccctgaacaagaagtaactttgcccagtgactgcatctctcagcctgttgctgcacttgaagtttgttctcagcagcattttcttagccattatttgaagacagtttcggaattcaaaagtagcaaattagaattcctctaaaaacagtcggtagttcagaccttccctcattttgctaatttttgacagggtctttgggtcaggaccaggactgggaaacccatgggactctagggatgactttagggataaggggattggggagattggctgccaggcagcccaaaggggaaggagcaggaacttccttggatgtcatcaaagccccatgaagaaactctggggctgagtggtgctgagtgcgctgattcgggtgcctgatgctatacagttcgcagaattctgccttgtgccagaattgctggggatcagaggaggctgctatttcaggcatctaagtgctactgctgctgaattcaggcctgagcagcttgtccgagagggcggggcagagatgctcctccaagcttttgaagctccacgaagggttcaaaggagtcttggagaagggattcctgtactgggcgggaagtggaaaggtgacctttgggtcacttctaactcctgagtctgtgattctgaggcaaatggaacttcctctctccctcggttaccaacatgcactccaagatctggctgagttcattggaatcaaaggctggtaccttcaaagggctggtggagagaaaagggcctggggcttgggaaacctgcagctactccgtgacctctggcttatccccttgcccctcctctgttgtggccaagaaaagtggtggggctctgggacccaacagaccagagtccacctcccatcagagtggcagaaagagatggtgggggatggggaggcaccgtagtacaggggtgtcagagagcccaaaggtcattctaaacacacattttttcatctgtgctctgcaaccaactctgcgtgtttgtcagacaaaagagctttaataaatattagtttaatgaataaatgtgtcaccttggcagagctctccctctccctcagtcttcttttttcatcagccagtcttaaagagagcagggtggaagatgtctgaagccctgtcctgaaagctgatgccctcagaagttccctgcactggggcccctggcctttctgaaatgtaggcaagcccttcatcccattatcaagccatgttatttaccctccctgttttccagacagaaagaaggtgcagatggcccatgggattaaaattgggattggaaccaagattttccaagcctacaaaactcctttctcctctccccctcccctccccaggcgtatggctgcagctacgcttgtcaccatccgagactgcattggccacaggagatgtggatgatttttccatttgtcctgatgtttatttcatgcccatcaatatcagcccgtattaggacagatgaggtggctatttacaggctgtgcattttcacacttggtaattataaacccttccctggttcggtcagagtcgtggagatccattttggcaattagcagtttagtatttgtttaatgggaatgtgagagagtgttccggcacatcagtgctcccctaaatgatttgcctctctcctctggagctggcaggcttgggcctttttcatggtaggtgaggcctgatggggagaggctggagagggggagaagggagcattcagcagttcagcagcctgcctgccactcccctcccccagcacatgcacgcacgcactcacaatcagtgctgaacacgggcctggatttccagagcacagcagccgccacttgaaggagcctcacacgagaggccgttaggccagatgccatttccatgtgacagctgtcaagcctgccggatccaactgctgctcctcaaacagctctctctctcagtgtctctctccccttccctcatcgcctcctctctacaccccatctcagatatccccagtgacagcctgctgccccactctccagggtggtgcttgggcccacggctttgcaagctcagccagaatggagctcccacccagtcctacctctcaccgggagactctgccttccctggcttagtcttgagatagggcctcctgggactgctcccccaagggcacactggttctgttagtggccttcccttggcatagtccattcacaataagaaaacccacagcattgggtgtggctcccggcttaactgcatggaccatgtatgggtgtgtgcatgcaggcgaggggattgccaggatggggcagtgaattgagccagtgtctgttatgatgagcattttctgtgtggtaggcgctcactggctaccacatgagccttcctaacaactccaggaagcaagacacactgagtatccttagagtcactgcacggggcggggagactcgcatggctgagcctggactgcgttccagagccctctggcagttccagctctgctagaggcttgctccatgactatggaggagcccggtgatctcgagcttttggaattcacttatctaaaaggaagagacccaatatcctcctctttcctttacctttccaatcattcctcctctcccgagcctaccggggcaatatacctccatttccttgaggttacctaatcacctctattcactttttggtagagttttaaagcagtgtttgttggttcatccagcagacaggggcactgcacaaagctcttagggattcaaaaaacagaacacaagtaagggagaacagaagacttagggactcatctgattttaactactggctccaccatttacttacctgtgtgatcctaggcaagtcacttactgtcggtgaaccacaatttcctcacctgtaaaatgggtgtatgatgccacgtgtgtgggcacgtgcctgtaatcccaagctactcaggaggctgagtcgggaggatcgctggagcccaggagtttgataccagcctgggcagacaaatcgagaccccatccctacaaaaaataaaaaataaaaatttttaaattttaaaaagagaaaaaaaatgggtgcctgaaatgggtatgatagtatctacctccaagctattgcagtaattaaatgagctttgcaaattgcctattacgctccagtaaatggtagttattataacaatcattatttcaggaggatagacattttataacttagagtctgatacagacttgtggaatcagaatctctgagcaggaggttttgccttaggtagataaaatgtctacgtctccaggattaagttgtctgaagaccccacatctttcagttcccatgggcaggtgtccctttgttgaattcataactgctatctgataaacattgtgcgttttttcttgtaagctaaatgggaaaatagaatgatcccacaagaataaaagaagtaaatgtaggaaaaaattaagggctgtaaaggtcttgctaatggggacaaaatactctggccattgtaaggtgtgggagccttctgtgaagagttcgagaaatgttcttaatgccactgaactgtagaccccaaaaatggttaaaatgataaattttattttatatattttttgccacaattaagaacaatttttttcatttaggagatattttattttatttttgaggcagtcttgctctgtcgcccaggctggagtgcagtaccatgatctcagctcactgcagcctccgcctcctgggttcaagcaattctcctgcctcagcctccagagtagctgggattacagttgtgcaccacgacacccaactaaattttttttttttcttgtatttttagtagagatggagtttcaccatgttagccaggctggtcttgaactcgggacctcaagtgatctgcccacctcggcctcccaaagtgctggaattacagacgtgagccactgcccccagccctagttgaggagaaattatgtagactttttctcttgttagtcagtaaaggcctgggttcaaattaaaataaacaggctttcagatggatgcaaactagcattttttgacatttggaatgaaggaaaaacgtgcctggcagcagcagctgggatagaaactccaagcgcaccttcatcactgcagtcttccaggggtaaacacacagggacagaaaggctggctgtagcaggaggaggccaagaacctgagatgggcaggaaggcagcggctggcaggctgaggcttggactcaaaagcccagcatctgaaccccaggcccagcccctgccggctctaggacaaaccagtaggaaaactgagtctcagagaatttgtaatactccctttctcgtggggttattgtgaccacgaaagtagtaataatacctgtgaaaatattggtggtgatgggaaaaaaaacaatggttttgttaggttttcttaaagccctctgttcatttttggctcttccgagctgcttctcatatagaactttggctttcttgtactaagactgagttaagcttaaggagagccctaagaaagtaggatgaggcaaggagtgcctgctcctgacttctggcagggaatgaacttctaatctttaggcagcagaaggcccattaatactcatttacttagggcctgtctacacacacatatgctgtgttacggctcaactcagctctatttagccatttagaacggtgggtctcggccttggctgtaccctggatcactggggagctttaaaaaatcctctttcgggctgcccactccagagtactgatttaataggttggggtgtggccttggtgagcagtcacggctgaaaaatcactgatgtagatttcagaatgaaccaatgggattttccagtctgctccttcttctccgtccttcctctttggagaatggttaaagacagaccaaccccacccttttcaaggccagagcacacggaaaagtcttatttcaataaactacacattattcctgagctttacggaaggaaccgatttgggttttgcctaagctggcagggagagaggtggagacagtgccttcccatgttctgcgtaatcctggacccaggcagcggctgtctccaccacaggccccaggcacctgtggcctgggcagtcctgccacctcagccgagtctcactcttgtggccttagctccttgagtttacagagcataatgcctgttaagcctgacacactatagtatcatggtattgcatttgagggtgtttatttatactaacacttggagcgtttgagtgggagcaggaagagaaattcaagggcatttgttctgggggagtttggagagctgggtttcttctcttccctttcccctccctccttgcatttgaccagataatttaaggatcatctgaagtgccgtttcctgctttgttcttgatatgtgtggcttgcgggtgtgtatatttatatccccagaggagtaggacatttctcagggcatgcatcggccacagcaaagctctggagcagcctcacagcacagagagtttgcaaaagcccagtggccaagtcaatgcttccagagcatcgtcccagctgcctctggagtccatgttagcattccaggcagagagtctttatgcatggatcttaggggccatctcatagaatttcctcctttcacagaagaaaaactgaggatagaggagggaggtgactggtcctcagtgagatcctggtggggctgggattagaacctggactccctccatgcttggtgcggcactccccaccacacccagctgcctcccaacacctgctgagttacgtaccagcaacactgctctttagctgtctcctgggaacaagttttttgtgtcctcagatcagttcagcttcactcacctactatgtatttggggagccaaaactgtaaaaccttcagcagaagaggcagtggtccaggggacatactgtaggttcccacccattagccagctaactggacaatagcatttttgacctccctccatgtacctttgcattgtgtcctttttttttttttttgaggtggagtctcactctgtcatccaggctggagtgcaatggcgtaatctcagctcactgcaacctccacctcccaggttcaagcaattctcctgcctcagcctcccgcgcagctgggattacaagcacacaccacaacgcccacctaattttttgtatttttagtagagacgggatttcactatgttggccaggctggtctcgaactcctgacctcagtgacctgcccacctctgcctcccaaagtgttgggattacaggcgtgagccaccacgcccggcctgcattgcgtctttaaagttttcctattcagccagcacgtgagctgggctgtctcaagtctaacccctggatgtggtcagtaccatctggctacttctaaaatcacccagcaagaatgcctggctcacaataaatcttttgactcattagaaagagggttcactcattcactaaatgaattaggattagagaggcatcacccactgacttgagtggtaattattgctgattttcacggtgctcatttagtgaggaacatgttgccagtttctcttggcgcttctaggatctctgtctccaaccttgctgatggggtgagatttagaagaggtccgtccacaccttaatgcctgtgttccatgtggaatgttccatgaagagcgtgctccatgtggaatgtggaacctgatagtttaattctctgccacatttagcactttcccttattctgccccttttctttcctttgctttctagtattattttagactgtctatcttctgattacaagctttctttgttgttttgggggatttttttagaatgaggaccacgtatgagttacctatggccacaagaatgctgtgtaactaaccccaaaacttcaggggcaggcagtaactgtttatctcacgtgtttggagtaaacttggagtggttctgctgatcctggctggcctcacttgcatgctttgagggtgactggctgtccacccatctaggctggcctcggcacagggaagttggccctgctccatgtgccacccatcctgcatcaggctagcctgggcatgcccttgtcatggtgatggcagaggtgcaagagagaacaagcaggaacttgcaaatcctcttaaggctaggcccaaaacaggcatactcttccccccaccgcattttattagccctaacaaattaagcccagattcaagggatgaaagtagactccacctctttgggggagaaggaccgcaaactcacagaggaacgggtgtgagaccattcatatcatcagtccaccatagacctgtgtgagttgtcttttatttgtacttaggctgatgttttgcaaatagcgaatgcctcatacatgcatgttgcataaaagtaaataaagttaccatttgctaagttttctattcaagattggattggctgcataatctagacatgagtttatctgttagatagatctagacatgagtttatctgtgaataagagtttatctgttagaaggaaagtttatgtcatcctagtagaatctggatttttctttcatcgggtgcagggcaagttggttgccactaagaaatccctcttcttatcatcttttccatcgtggggtctaccatcatcatttttaggattttagaatataaacatctgagagaaggggaacaaagagagggagaacttgccacactgaagtgtggaacttgctcctagatgggaaattttgtttcatgtattgaccactgagtgtatgttaaagaggaagaagcaacctctgcccagtgtctttaacctttgctcttgcttcttacccttagagtagctcatggaaagaggggtctctgggccagcagctgcatcagcatcacctgggagcttgttagaaatgcaaatactactgaatcagtcactctggctctgaggcccccgggagatctgtggcttaacagtccctctgatgatgattctgatgtggatgatatttgagaatccctgccccaactccagcagccatagaaactaacagattaggtcccctttgttgactctcacatacttctgaggatattacagcatagtctgaaccgtgcagtagtcagaaatatgttcaataccttctggtgtcaggacaaagacagaggcatcccattccccaccagcttacctaaatgttactttactttgcttttttggggggggcaggtgggggaggttgtgttttgagacagggtctcgctctgtagctcaggctggagtgcagtggtgcagtcatggttcactacagcctcaacctcccaggctcaagcaatcttaccatctcagccatctgagtagttggaaccactggtgtgtgccacaatgcctggctaagtttttagtatttttttgtagagatgaggtcttgctatgttgcccaggctggtctcaaactcctggcctcaagcgattttcccacctcagcctcctaaagtgctgggattactagacatgagccagcatatccggcctattttgctttttcattcacaaagatacaccactaaagatgtcagggccatatctcaaacctgccccaagttattacaaggtacatctcaaggttggaataagctccttttcccaaaacagaccagggttctgccaggacatgggacaaatcatgctgaggatcagacacctcttgtccttctgtctccctcaggggagccactaggcctgcaggtgcccatttcaggtacaaagaattttgtaaggcaggtgagcgcgttgtcaacatgaagtaagtaccagagttaatcataaggatgagggtggtgtccctagaaggggtatttcataaggggttagagaaactcctgttcctggccgggcacagtggctcacacctgtaatcccagcactttgggaggccaaggtaggtggatcacaaggtcaggagttcaagaccagcctgaccaatgtggtgaaaccccgtctctactaaaaatacaaaaattagccaggcatggtggtgcatgcctgtaatcccagctactcaggaggctgaggcaggagaatcacttgaacccaggaggcgggggtagcagtgagccaagatcatgccattgcactccagcctgggtgacagaatgagactgtctcaaaggaaaaaaaagaaaaaagaaaaactcctgttcccagcttcccctaagcttttgggctctcctagcatcttgaatgaggcctggcctgtgtgttcatgttgatgagtcttcatagccccctgatatacctgggtgtgtgtgtgtgtgtgtgtgtgtgtgtgtgtgtgtgtgtgtgtgtgtgtgtgacagagagagagagagagagacaaagacagagaccgagagagttatcagctggctggctccaggattgaataccagttaccttaactgtgccccttattttcccttgactcacacaagccgcttctgtttgattcacatagaaccgtgagaaacagtctcgtatgtgagactgtgtttttcattctattcagtctttgtatattcaaattcttctagtttcagctcttgctgttctgccagatttccatcgcattgatggcttctctgaattaataagtattttgcaattgctgaaaagttttctacccccaagcactgggacttatccatattgatttttctcccgtttctctttcctctctagctccttcttagatgttgtattttgtaacgtgttaatagaatttttctttcgtcctgacactttatctattcaggaggtctttgcgagccccattgtacagccggactacagaggaaagagctgtattctttatgacaatggttgccctaaaaacatatacagatcctcccccacgctcaccagggtggagcgaatgttgagagggcgctattagaaaacgtccaaacttaggaaggaaaaggagagccaattatgcactgttgaaaggaggttttgaaaatacgttttaaaaaaaatccaaaacatttatttcctaagggaatctgagtcccagtaccaaaacatggccagcacagaagggcagctgttttccttactgttaggcattttcagttcaaaataaggatttggcaaaagtcttagaaaatatggagatgggtgcaaaacagatgtcacatttacctgcgtgatacctggcaggactcatcccccacccacccacccacaccccaggcattcgaattcctattgagtcccagggtctgagtctgagatatgctcatatcaccatatgctcgagtgtgactgctctgtgtacaaacacaccagttgatcttatggtgattttgcctgtgtggtgcacgggaggtggaacggctgttgtgtgtgtggccccagcaggttaccgtcggcgggggctcttgaagcctgcccaaaaggagtttgtcctgcctgggatgggcatggggatctccaaactagcattgcccactcccatcatcctggtgcctgggagagagggggcagctgcctgctggaggagccaccatgccaggccattttcctcccagtaactgacttcagaaatggggagcagaaggggaaggccccaggagcctgtttgttcaggcttggttgcttagcaacaaaagggggccctgacttgagaagagatttttaagccaggccagtccctttgaggtttatgaccggcttgcctacccccatcttccattcttaccttgactttgctcttccccctattacatttgatcgcatctagaaaaatacgtttgatttgtctgcaggcaccattttaaaccttggtttattgctttgcccagcgtcttcccctccattggagattgtagtctgggaggagtgaggcatgaatagcccacgattccttttctcaaagggattagcgccagcccccaagctcatttgtgagcctttgagtgcacatcaacggtgctcagtccttcttagccacaggcacacagtgaaattgctctgaggacagggccccccgctaacagttttaccccccctacagccacacggactgggttgtatttttaccatcaaccttgagcacaaagtaaatgaagagagtaggctgcacactggtcagaccaggtgccctcccccggtgcgtagctgaagggtgaggacaaacacctgtgctaaagatgtgtgctctgtgggataaaggagtgggtcataaatactcataaaaggagtgcattccagagcggaatctggttcattaagtgtgagttccttgagctctacgtgggagttgagtgtggaccctgaaatcttattgccagaaacatgcagaaggggttacaggatgcgtgggaggggtctggaagggattagcaagagagacagaggacgcctttgctattttattatgttcttctctttgatgtttttaaaaaggtcctagcatcagtgtatttgtttgctagtactgccataataaagtaacgcagattggagggctaaaacaacagaaatgtattttctcacaattctggaggctagaagttcaagatcaaggtgtggcagggttggtttcttctgaggcctctctccttggcttgcagtcttctccctgtgttggcacatggtcttccctgtttgtgtttgtgtcctaatctcttctgataaggacaccagtcatattggattagggcccaccctaatgatctcattttaaattaattacttctttgaagaacctctctccaaatacggtcacattttgaggtcctgggggttaggacttcaactatgaattttgggagacacagttgagcccataacaatcaggatgttcaagcttcactgtttatcactaaaaacaattcacatgtctattagaagggcaataattaagtaagctatggcttcttacactgggaaatatgcatcggtcaagatagtagtatacatgatatactaacctggaaattgtttgccatattgtaatgttacaggttaacaaaaggacaaattccatatactatatgatttaaactatattgaaatagtcatagttttttctttctttagaaaaaaaatactccaggcctggagcagtggctcacacctataatctcagcgctttgaaaggctgctgcaggaggatcacttgagcccaggagttcaagaccagtctgagcaacatagtgggaccctgtctctaaaaaaataaaataaaataactgggcatgatggtacatgcctgtagtcccagctactcaggaagctgaggcaggaggattgcttgagctcaggaggtcgagactgcagtgagccgtgatggtgccactgcactctagcctgggtgacagagtgagaccctgtctcaaaaaataaaaagcagacactaaagggaactatataaaatgttaactgtatacaacggtgtggagtggaaagaccactgtttttttttctttctacttttttgcattttcaaatattttttgataagcaactattacttctgtaatggaaactaccccctcaccccccgacatgcatataatgttttgtgtactttcttaaaattcctaaggcagcctgtattctatatttgttttgcaggtggaagatgcaatgctgatgtttgataaaactaccaacaggcacagaggtaagattaccccagtgtaagagggttgcgttcaccctctcctggcctctctgtctgtcatccccagtcccactgacaaaagatacagtgaagagtccagagtcaagcaggtagaggtgaccatccattgaagatctttattcacggagagtcccagtagcacaaagagttccagtactggatagctgaaaaaccatttccttctggcctaggaactcctgtttagttatgcagccatccctgacacacatattcagatgtacctctctaatcctgcctttctgggtcccttgctaacctcggcactaagcgatccaagtggaaattattcacagcagtgactcaattgagttatcaatttgtattgaaggaggttctttaggagcagactgtcaatctaaagagccaaaaaatcaaaataaaacattgtaggttcgttgggtgtgtagtgattacagccttgggaatgctccgtggggcctctggaatgtgtagagggcatctgtacttaattgtgtttttccctgtgctgcttctgtcccatccactttacaaaaaatgggtcttaacctggagtctatgaacctctgcaatgacatgcaaaatgtcatatgtttatacttttcttgggtgaagatccctaggtttggacaaattctcaaaagggtctctggccctgcccttagtctcttccttccccaaaaagaacacattaaatttattgctttaaacagaaaaattggaggcatctagaaaagtcctccctggaggtagcagagtcaaaggaggtgatgacttagtgttctgttctccggaagctcaggtttctggggttcctattaacagggtgttaatgagcagagcttcctaagggggtggcaggaaatggtgtgctggtgccctcaagggagggagcctgtgagtgagcagcatttccttgccacttggatcgcatttagatgtttcctgtgttgtttacattcctgctgtcacctgtgattagaaacagttacccagcactgactgtatgtctttcctgtttggagaaggcagagtgagtgaaaggcaagaaggagtggagtgggaatcattgctggcggggctgggagaaggagggggatatcctgagtgcgtctggtaatctggcttcaaatgcatccctctacagcatcctcagaatgggagaatggagcattgggtgcacaacagtggtgtcaagtggtatttatggagggaagagatggcagggggtggagggtggggagcagtggagaagcagggagagaaaggaggggcatgcaggtgtggaatgatcgattttgtccactgcattgctggggagtgagagcccagtgagtgagatgaaggtggtgcccgtggtgggcaattgaggattatcctccatcatcatccacattctgtcaatctagctttatggtttccaagccggacttccagatgcatctcctaatgtgaccttcacagcagcccctggagggttgttgtgacattgggaaaaatcacttaacttctttatgcctcagtttattcatctgtaggatgggggtaatcatagaacctcctcacaggattgctcggagagtgtaatgccaagcatctagtcaattgtgcgtaaatgttagctcttattattagcgttatcatcacctccgtccggttggaaaaataaccaaggctcagaggaggcaactgagagacccatggctgagcagggtctcaggactattgatttcaaattctgctgtttctctgctgtgtccagatgggaatgcatttgttaaaaagagcactgccagctatttattttcagggtgggtgatgcccatttgagtttggcacctggtgttcagtgttagaattcatagtcctgggagattccagagttgcccccaggtgatactgttgtccttttattttgaaaatcagtgaaagtattttttgatctgctgtgtgtcaagccctgtgctgggggctcacactggtatcgtctcattaactctcagagccgggcagggagagggctggtcatggcagaggtggggttgaaacaccggactttggacttctgggtgaaggcccagaggatgtgccgggaaaagtcctctcttatttttaaccagatccctgttgctgtgggtgaagcctcttccctttttccaaaagggagaaaggaaagtgctgggccgcagagatggggtggcggttcgtctgggacgggcgtgggaagagttttttgcccgttgtgaggtggaggatggtctgttggaaggcccgctgctcagaatggcttcgggacatcattgctggctctccaggagtcctggtgggcactggcaggaaggagcgtgggcagggccttggtgcatgcacactcctgcccccagccaagccagaacctctgctagcaccctcggacctgccagagctgaagatgcctgcagtgggggcaggaccaactctaaaatgtgtggagcccagaactagaggaaaggcagggcctcctattcaaagatgattgagaagctggcctgaggggctgcagcctgtggagggcagagacatgccaggaagcctcagcagggaagagccgccatcccactgccctccctctcatccagggccctcccactctgcaatgtcgtttctgtgtgggtgggagcagcggcccatacacacgttccaacccctcaagataccggaggaggcatttctctttgaactgggtgctaaagttggtgtaatacttcactgcatttagaacattgaagagagtgaaaaaaaatttttgtttttcaaaaagaagaacatatcacagcagaggcacagatcatatatatggagcgagccggccccacatctgtggcctgatggagtgcacatttggagtcaggtgataagcacaaggaagtaaaatcctcatgcagccaccttgccccaaacttaccttcacctcctcggttcctgctgtccatgatcttatcaagaggaaagtgctgcagtggcagaagttgaggacatctccctggctggcgccgcctccagctctcttcttaaagaggcccagaccatcgacccagaggtgttgtcacagcacatgctcagcacttgtcctcagactcctagcccagccctgtggggcagcctggggcctcaactcatccttaccccaggaattttgacagctacctgtgtgtccttggagctgtgtgacatgagctgtgtgacatttgctgctcggggataaccacagggaactgggcttaacatctgatgagcgtcaggtgggccaggctcccagggcccattcagtctccacttgctgttaggagccacaggtcagggcagaatttccactccttgaccccactggtcacctcctgtccctgctccctgttggtctctgttggggcagggatgccctcagttccatctgcatggcggcagcttgtatctcccatccacaggagcaccagcctggggctcactagtgccatgggagagaacccaggacctaggagagaatgagcctcccgcaatgtatgtcttccaccctgcaagcaggaagagggtcccacgttcagtctttgactcacagtgggtggagccctggagatgtgggggctctcacctttctccttgcagatgggccttcctccagcttctgctgctcccatgacatttttcctgggggcacattccctgacctctgagcatctcaggttcttcctctaaaaaataagagacctgggattgatgagccccaggacctgaagtatgtttctggcctttagctttttaactgtgagaatgttcaagatgaattcctttgctgtttttgtgactaggggagggaatgggcagttgttgcaggttgggttccctgggaagcaactctaggaagggattagcaagtgggaggtttatccagaagtgctcttgatcaggagagggcagagggagaagctgacttgcgatgcccttctgtaatggggtggttcttcaggggtccccagctggggtgggagtgccatccttgatgcctgcacgctggcctgtcattgggtgcagcccaccctgtgaggctgatgtgacctgggcttcccctggggaaatcctggaggggacttccagctggggactatcttccagcagcactcccagccactgggaaggaggtccttcattcctgaaggggatctaagcatcctgacacagcacccactgtgatggtgtgtggagttctgttgctgtctaagcaggccatgttagcaatcttgatagaaacagccaacactttctgagcacttacaacaccaagtgcttagcacagtgctggcacctaccattgaaccttgatgacagacagccataggtgaaccgagctgcccagagtctcacactggtgaaagcagagctgggacgtaaacccagcctgtctgacctggagctcaggctcttacactctgcaagcattgtgcaaggtaactggttaaagcggaggagctggtcattttaagggtttggtatttcctcattttctgtccttctccacaacagccttcttgctggatgaccgtgctcctccatttccacttggagaaattaaggcacataagtttggaatattgcatagcagattcctgcagccagacaaggagcagagctgttgttaaaacctggatgccagtcggcacgatggctcacacctgtaatcccagcactttgggaggccgaggcgggtggatcaccagaggtcaggagttcaagaccagcctggccaacatggtgataccctgtctctactaaaaatacaaaaattagccgggtgtggtggtgggtgcctcctgaaatcccagccacccgggaggctgaggcaggagaatcgcttgaacccaggaggcggaggttgcagtgagccgagatggcgccattgcactccagcctgggcaacaagagtgaaactccgtctcacaaaaatataaaacaaaaacctggatgcctcccttggccctgtccctcacttcatttcctggccttccatacgatgatttgtgcccagggggagcggagaatggtggctttccaatcttctcagagtcacttcatttgctgtctaaaagttgttagagatggtctggaaaacactgggctgatcgtcaatggatttaatcattaggagggggaagtttgttgctttatccttgtaaaagtcagataagatctgggacttggcattaagtattgatcccaagtggggctggaggggagggacagggagggaagaggcaacaaggtgctgtccttccagtttgctctgttgttggcaggaggccggggagtagacagccagcgggagggaggaagggtgcactggccagctctctctccagtgtccccacaacctcagccctgatggagaaagtggaatgcgggcatgttgcttgctgaaataatctcacactcacctccttatgggggaagggaaccctccccattgtgagggtcactgtagaggatcctcagctgtccttccctccaatttcagagccctgggttcctgagccctgcacagctgggttcctccagggaagatctggatggttgaggcctagttgaaaggaggtgaggagtctctgaagctaatcccatagcctggtgagggagtggtttctggcagaggacatccctgtggccttcattacccagcaggcctgcttgccctggaacattgccagaggcaaaggaacaggagacacggggagagaaataaagattagtgtgatggatgactcttctgccagcagttagcagttgcttattaaatgcaatgctaatggctttggagaggaataacagccctgagacccactggaagggggtgggatggttttgtgagccccagcgagcaccatcagtggcaggcctcttgaactaagagggtcctttcccagagtggctgtggtttatcccagttcctgggctggaaaggtgcagtggttggggatccagccagagggaggagcatccaggcaggtggccggagagcttgggttcttcctggagcttgctcagtctctgtcccgaaaagcagctggccaaagtttaaggtctttgtaatttgcgtaatcggtttatttattaaaatggtgccagtaagatgtaacttaagctgtgatagaagataatgcttttctaaggaggaagaacagcccttaatgttttgaatacctgccagacactcacttttgaaattgacctctgaagtccagattgactcttttatgtacgatgtataaagatgcctaagaattgcactgtcattatttgtttattggtgtctattactcaaaaaaaaaaagagggcatagaaaaaagtttcacaaaggtgtaggttacattttaaaataatttaaagcattgcttcacttgtaggtgtgggatgtcagacataatgtatgcatgtccttcctaatgagagtctaacattctgactttatttacctagggaagaacgttgggactgtataagctgtacatgtgactttgtaggatggaggaataagtgtatttgacaaaaacgatcagaccctctggccagaaagggcacagtccaagaagaagggttgttggagggagtagaaagtatgataaggatgtgtagaatcacagctggtgatgacacttttgctgatgtgacaggagggcagcctgcaaaagattggctcccacgctgccctcgtttggggtctggagcaggatttgctgcctgtcttccctgctggcattttaccggtagtattttccccacctctcaaatctgctcttatcttttcactaattgttgatggtgttaagtatccatcaaatcctctcccaagtctgagatgtgttaaggggtttattggaagcctgtaaaccaacagttggtcactattggtattgatcctaattctgcaccaggattagaaaccacttgacaagaaagcggacagtctgtcatagaccaccaccaacagccagggttcctggcctcccagagctttcagtttagtccgtagtgtgatgtaacatgccagctgggttctcttaggtaagttcagggtcctagatggggttaggtgaaaatccagttctctttccagagtggaccattgttgggtggcagagggtggggcggtgggcaactgtttaagaaagacattgaccaacaggaatctgggagagaatggtgagaatggggtagaaactcaatatgattgagtccaagaggtcttgaggggagtggagagctgtgatgtggtcattcattgcagcctttgggtacttgaagagtttccattggaaaagagttctgtgtagcctcaatgttgggcacacttgagttagaacaaggaagaatcgcctagtccaacagtggcaataagaggacagccattgcccctctgccagattctcagaacccaaggttctgtgcctccagtgggctcattctaaagctgggactgtgtgagggggtgggcatgctgcgtgcccaccgtgaggggcacacccgcctcttcactgccttgcagggctgtatccccaggccctgtaaccttgcagcgatggagggcaaaggagggggtgggataaagagtcagcccaccctttgccatctttcagagaccagccccggagctgtctgcacattttattttctcgttaaataaacaccattagccttcctgagaaattggtgcaaacatgacctcgcaaataaccaattaaaagggtagggttgaaggggaatgtgaatttgaaaacatgtagaggaggccattaaggattcctgtagaatctggcaacatcgatccaagaccttaattttatttctgacaggaaagcaaggagtgtgctttcatttttttcccccgagttaactcaattccggaagcgcccattccggcgctgtctcttgagatattaatcaacacagtagcttggtttctgttcacctgctcttctttggagacacggagtaatacaaagccctcaacttcctagcaacagggctgggggacagggtgcccggggcaagagggagcttgcaaagccagggggagtttggtacccaggatgagctgcacttttttagccaaaatacaaatcttaaacttctttcctttggaataaaagccctggcaccaaaagggtggtgacctaataggtcttcctgcctccccctgctgtggcccacggaagcagaaagggagtgggctcagggtcagcaacttcactgacccagaagtggtttttttgtagagagggacaatgaatcttttgtttggtcctgttcccatagaggcccaggctctgactctcacaacatggtttaagatctcggtgagggcagagtgtggagatctgaagagaaaggagcttttagcatggcagcttgattaaaagcaccccctttcttagcatcacggcactgccagtggccggagagggctgggccaggggtcgccgcaagccctgggtggctgcctccccgttgggacttaaggttcctagaggggtcccggttattatgcacctctggacttcagcctctgttttcagtttgtggatcagagggtgtacgctatcccatctgtatctgtatatcagcatggtatgctgcaaagagcttgagttttagagttggtcatactcggtttcagatcccagctttcccttgggcgtgatctcaggcaagttacaagatgttttactcccttgtgaaggtaacacacccgctctgtaagagttaaatgattccgcttgcgaggtgcccactccccactccccgcaagtggagagtgcggggcagcctggtttcttcccccttcctccttaagtgaaaccacctgcttaacttctttaggcaaacaaactaaaatctgtgtttgagttttggggaccctagtcttgaaaaataaaaccctttcgtggttgttttttcctctgctttgcacacacacatatgcttgcatgtgcatggaatatctttgaaaggatgcctgcaaaatcggtaacaaggagttagaactgcatattggttaagatcacatgctctgaagtgagacaaatctaagctctgggacttaatagctgtgtgaccttgggcaacttacttatcttctctgcaactcagattccttatctgtaaaataggacattgggttagcctgaagcttacgtcatttaatgagtataaagggtttggaacagtctctgcccatactaaacactcaaatatgttttatgcacacgtgcatatcatatgcagatgtacatacattaaaaacatacatacataaaaaagtgtttgctccttttttatggggaagagaattaagcaacctgagatacagagacggagggaatctttttattatatactcatttactttttgaattttttttttttttttgagacggagtctggctctgttgcccaggctggagtgcagtggcgcaatcttggctcgctgcaatactttttgaatttttgtaccttatgcacttattacctattcatttacttctttagtgtgagcttttaaaatttattccaatttgaattgtcaatgcagtgatagaacaacgtgaaagagactttttgaaagaaagaaaatttaccagccgggcacagtggctcacggctgtaatcccagcactttcggaggccaaggtgggcagatcacttgaggtcaggagttcaagaccagcctagccaacagggtgaaaccccatctctactgaaaatacaaaaattagccaggaacggtggcacgtgcctgtaatcccagctactcaggaggctgaggcaggaaaattgcttgaacctggagacagaggttgctttttgtttccataaacagatgatctgatggatagatgaggattttcttagtagtttctgctcttcccagacaacgtgctattattagaatagccagactggccctggtctgaaaagaagcctggtttgcgccagttcatccaagaccagaggggaggagggccagaacagggaggtcctccatcccaggagctcaaagtgcttcgtaattcaagtttaaaaaaagttaaaagcatttttctaccccaagttatgactagtaaacacgtggggaccttacacagcgtggcaaatgcagaatcttcctctgcattcccattgtttatggcttaggagtcaaggcaacacccggttaatgatgcttgtgaagtgtctgggccatgtggcaaagggataagagcttaggtccagattcccactgcaggactcactttccagagcaaccactaatcaattgctgtgtgaccctggacaagttactaaatctctctgaacctcagttttctcatctattaaatggtgttaatgttattaactcatggacttgggaagtttaagtgagatagtttatctgtgtgaaacatctgatgcttggaaggctatctgtaaatgttaactttgtcattatcatattaattattgttattttactactaagaatactgtgactgtcattacttcgggaatggaggctcaggcttgctgattggagagaatgttaacaccctagatggctgctggcagatgctgtcaagttttccaccttgaagggtgttgtgggctgaattttgtcctccaaaagcataagttgaagtcctgacccctaaaagatacccccaaaagaagtcctaaccccaaaaagataagttgaaatacctcagaatgtgaccttatttagaaagagggtctttggaggtgtaatcgggttaagaggaggtcttagtggagtgaactgatctcaccatagtccttataagaaggaacatgtgaagagagagacacagggagatggccacatgacctcagaggcagggacaggggcagtgcggctgcaagccaaggattgctgaccacaccagaagctaagagaagagcctgaaacagattttcccctgagccttcaagagggcatggccttgccaacacctggatttcagatttctagctttcaaaactgagacagaataagtttctgttgttttaagctcccccctcccatttgtggtagcttgttatggcagccctaggaaaataatagggcaaagcagagtttcctgcccagtatgtccccttgctcactactggcctgcagtcctggtggtcagacttatccttctcgctctgtgccttgctagtcacaacccccctaagcaaaatgatgtgcaagagaagttagagaaaagacctttcatgcaactgagaacacagcccccgaagcctgacttggttcacaccttgcccaagtctaatttgccaaagaccttgaaagtgaccttaggatgttaaagatacattttggtagagagagagagagagagagagagagacacttcaagaagtctgaagtttacattttaatttagtggcctgcagggctcagtcatttctttataagccaaggaataaccagtacagttatgagttgtcagaattcccaactccagcgacacaaaccatactcattagagtggcgtttctagctggttcattcaacttggcaattcagggaaataatccagaaaaagaacgaaaggaagaaaaggaaggaattcaggagagctcatgtgtatgacaacatgcaccctggcatccctatatacctgcctcctttctatcctgaaaaaaaataagaaaacagcaagacaacactgaacttcaaaagctgccaaacagacttctttatttctttatgttgtcccagaagctctttcaggcaggaacatttgccaattcaatcctggagtgaatttttaagctaaattaatgcagttgggggtcaaaatggcaacacctacaggtcttcagttgtaaggacaccggtgggcacagcagtaattgatcattatagcactcatgtggatgtgcttctcttaatcccctggtttggttggcaaaccaagtagtgtataaaaatcactgccatgattttaaagtgatcaaagttgtacacctttgagcactccttacgcatttgaaatttctccctcaacttgccacccatcttggtatcaggaaataactgaaagtgccttcttccccctgaatgtgtccagcgttggtgcctgcgttctagcaccctaggcaaagctggcgcctctgcaccagatctgcaatgtgcgtacgcaatgctgacatccgatttattatctcggagggctgggctggttcatggatgattcatgactctgctttccactgccgctggaggtgacatcatctattcgggacccagaatagacacaggagcaacagtgggccgtgttttgtgtgtctctcaccagccctgggctccctcccacttgccaccccgctgctgggtgttcattgagtgagaatggtggtgacccaaggagtccgtcggaaatgtcttcttagtggaaggtcataaatgtgtttcaacactgttgcacaataaagcagagaagggacctttcccaaagttcatctcttcccttacgttcttctagttggaatttagatttcactggcaacccaagagctgcttcactctgtggccgactttgattttctcatgtagagacagggttggttaggaaagtctggctgagataatttatcccacagccttagcattggtcaccctgcatgatgactgattaatgtcatgttagatgttggaattggatcgatggtttccaacctggttgtacactaaaatcccctggggagtttttaagatgtcctgatgcctgagtcccaccccagaccaattaagtgagactgaaagatggagccctggcattggttatttttaacatttttccagctgatgctaatatgcagtcagggctgggcaccccctgggtcacatgaccttcaaggagccttccagctttcaaaccctttaaaaaggcagcactgctgacttggaccaggtctttgagcctggtctgtgtctgggcagtctggcacgtgtcctgctgttaagccctgggaggtggggatgcctccttcatgtggggcccttcgtgggtgactaggtcagctccatccgtcgtctgtgcccatgacttcttgtaattttcctttgtggcacttctcagttcttaatgattgctatttgcttgattatttgatttgtatctgtgtcttccactctcctccatgtcccctttgcccagcaaataccattaatctatgacaagagggtgggcactcaccttggtctctgtcctaatttgcctgaaaactgagaatggttcctactcaatgcttcccatctcaacttcctttgctctaacaaaacggaggtgcaggagccctgtctggagaggcgtgtaggagctacacctgtcttctgaagagggccttggagacctaaagaaatgatctgggaacactttttccagcacccaaggaaagaacccagcaaactaatgagaattttttcttgctggcttaagagggggggaaaatgcctttagtgttgttgtagctgttcttaacagctgatttagaagaaacactgaaagtattggtttgaatcaaaaacatcagtcctgcctgtagttccgccttggacccatgctgcctggttgcagccctggaaggctggggggacggcacgctttagccaggggtctgttgcagtatttaaagtgcctatgcatttctaccccagaggccaggtagagagaggtgtgtgcttacagatcgagttctaaatttcctccccacttccaaaatcactagttttggcatcttaagtcttcttttaattaagttgattcatttgctctggaaagagttttcctgattcagctagtatatttatgtataaactactctggaaacacctggcaatttttctgagtgacaatgaggagacgtcgtttgaaaattatggtttaatttgctccctcccccatgctgtcttaccttttcaaaaatgggtaagatttacaaaagaagctttgtattttgcccatatgttttacagcagagatatgtgtatcaacaatacctaataatttcccttcatgttatttttagaactctagcttttaatggacaattgaatcattccttggcaaagaggaaatcatctaattacatgtttttatttattatgaatttgcaggtaggccccagagagattggtgagcatatataaaaagttagaataaacagcatcttaatgactattttcaggagtgaaaaactatgttgtctctttagggttgcatcccagctctgtgtgttgtgtgtatgtgcgtgtgagtgttgcttgcagagtgtgtgtgcctgtgagtgtgtttgtgtgtaggtaggagggtgcaaggcacatttgaattggacgtggccctcggttggtttcagaaagtaaactggaatcaaaaacgctataaaggatcaaaataggagagaagacacctgcccctgttttattttgctttattttaggtttatggcctctttagtgtgggactaattaaaatcccctgataaggcctagtaccctggcctggtcattagcagcgttgttcacttttcctgggtaggataagtggcttccagaaacaaagtggtttgaatcagaaatggcacctcctgggttcatcccctcttttcttttctttataaggttctttcaaaatgcacggggtagggcgctgcaggtagcccagcgaatcttgctgctgccagggcagtagcagctggggtgggaagaggagagcagctggggttgtgttattagtcattccatgaagagattgatttgataaataataaagcagcgatattagcaacacatgcttgcaggtcagatgacttcgatgaaaacccccagttaagtgtgtgtaatggtttgacaatatatatgccttctaaaaacatcctattttaaaatggaaattggactgttcttgcaattcttagcaaatatgccaagaccattaccaaagggagcttggaaatctgaagggtgatgtttctatttaatttggcctctaccctccccctttcaaaggatgcttaaactcactttgttttcctgtccttgccttttcattttgttaactgttttgatttgtaaaatactatgcctcatactacactcctttatgatgatttactgtgctgttcttatctttcaccttaaatccttgataagagcattttaaaaatgagattgctacctgacactattataaaatcttggctggcagccagtggagaaacaagcacgtttggtgggggaggtgggggcagagaaggagactgagtttagagaaaggaaagattttcaaaggaactgtatagcagattttcccccctctgaattctggaggcccccccgttttttaagtagagcgttaatgcaacctcataagtgcctcctcactattgcctagtggaccgtggggtgggcggtgagtgaattgaacagacaaagattctttgggcaaaggttatctgcgctgaagatgaaactcccatatgtcctttgctatgaattggaactgggtggatggatggaccagacagatggatagcagtgaaccagctaccatatttatagctaggagcacgtgcccttctcaactccagacatccccacccctgtatcccaccttgttctgttccagacacatcagagcagagccccctttagttgcagcagctatggcagccgactgcccaaagatggaaacttctgtgtgtgtgttttgtctagagatctccttttatccacaaagggcatcaccgatggggggaccagtaaatagagctgtctgaagtagcaggccgttgaaattctagtattgtgacttaatgaactcttgtctttaattcctatgacttggagaagacagccattctctccccataatggagctcgttaacccatctctgtactgactggtgcttttattattattatgacgactggagaacataagtctgaatgttagaataacaggtttcccaagtgcctggcagagaagggggtgtataatgatgatgatctttcgtgggaataacagcggccaccggcttatctggcgcaggcattattacatctgagtcgcctgaagtgccatttgtgaagacctggtatttattgtcctagattattggggtgggggagggtgaggcagcagaggggacacttatcatcccgtcagggctcgacagccgaggggcagctgctgggtgcgaaggccacagtcagcgggaggcccctgtgtgtaactggagattccggggcgattatgcccaatttatcacgcacctcatgaaaatacaatccaccaccaaaatgactgcttttggaaactgtcttgtctcttttgagccgagactggagacaaccagacaaggttcggtggtaatgaataaagaaacattactttctgaacacaatcttctgtcaccagtcacttttcaacagacattcaatcaaaatgctaatagcagcggcaacaagggaccgcggttattgtaatactaattgattggttggagggtgggttttgataagtgcagccgaagatttctgaaatatgattctccttaattactgtgatgctaataaaaacgaacaaatgatttaatgatgatttcctgggtaatggcttaaagattttgtttgagtttaaaatgagatagggtaaaaaatacaccagaaaaatagggctctggtgggtggccttgcctttatcaaacctaggcatggggattcaaatccaagaatgcccttggaaggctgtgtggcatggtgataaaggcctctcctgggcagccagggacgaccaggctgtgggtggattccagcttgaagtcattggcacttctgagagtggatgctgatctgtccatgtgttccctttgggtttccccaggatggccaggctgtagcctcccgctgtggggcagagtgaaaccccctgccccaggagaggtacatctgtgcttgaggctctggggcttcatgctcttgtcccacggccactgtgtcctgggcccttccatgttccaggtgcaatgctagttctggcagtactgcagggaacaaggcaggccaaatcccagccctcctgagctcatgttctgcggggagaaggaacatacatcacacgatttcaggtactgctgagggctaagaagaagagaaaatagggagctgttggcgagggggcctgggcctactctgtttaggtgggtagctgggagtggcctccctgaggaataggccttggacttgggaggcagagaactgtgagaaaggcattccaaggagcagataacagcaagtgtgcaggacctggcatgggaaggaactgattgatgtgttggtaggacaggtggagggctggggcctccaagagggacagtggtagagatgactgagagaggcagacaagcgctggatggtaaatgacttgtgagccaggcaaggcagatgggaaccctcaggaggaggtcagaagggcagaggcatatggctggtgctctagaaagatcccagtggctccctgaattaaggaaggacggggatgcatgtttggaagcagggtggccagtggaagtttattggagaagtgcagtggagagctgatggcgtcttgggtgagggttgtacagtggaggtggggagaggcagtgggatttaaaatttatatttggagacaagttatggtagattctgatggattggaaatgggttatgaggtgaggggagagagaaaaattagagtgaactctaggttcttgggttgagctcttgagggatggtagtgctattcaatagtatggggactgctttggtggaaggaacacattttaagaagaaaatcagttgttctgtttgaaattcccattgggatccatttggtgatgtttagtagttgcatagacaaaaagtacacacacacacacacacacacacacacacacacacacacacacacacgtctctggagaattaacataacctacccaattgtttttgcataaacctctctaaggaaaggattgtttcaggggaactctgagtagattttatcatcagtgtggtagacagtgaaacttggagaaagggtggttgtttggtccctaaacactccagtttttctagcattcagggtcccctgtgcttttctgttgcagttcatccagagtgttttgtgaatgatgttgcattcaagaatcaaagcatcattgcatccaccccaacagggaagagagatcccatagatgtggacgctctttagtacgcatcgtggcatcctcctcccagtgtgtgtagaggggtttgggctcactgtgaatgtcctaggaaaaccaactctggggtccaaagccctgaccactcccttcttcttaacagctccctgggtctctcagatttcaagggcttaacctgtacagaggggcttaccctttgtatccctgtccatgcagatcataggtgggcctccctggggtgggtgcagctctgacatattaattcgtttaaaaaaaaaatcagatttgtgttattggggtgggagtgggggcttaattggggcggagaggcagtgatagccttcctttcaatttgtcaagctttctttcaaaagatctgccaaagaagaaagggtaattaataggcttgaagtcatttccgatgtgtcaggatttctgccttgcttccaagtgataatgttcgcaggctccgggcctctagggagccttccgtcttattaacttgtctgggagaaacagggagtagggacagctcgggccagtgggtgacaggaaataaagatttgtggtgtagtgagctgtaaacactagggctggagaagtttggtgtggggggctgggagcgggtgggggtggtgcagagggagagggtttgctctcaaactccacttcatgaagcaaagtcctagagtttcctgggtcagatggccattcggagtcagcccggataaccccagggaagaagtgctttttaatgagcagtgtttagacactcggcaatttttgtgtgtgttcacctcttcaccccttacttctcactgtttgtttacccttcccccccccacccccccgccaaaaaaaatcatctcccactgaaaagatctttggactttacagtggttattctcacaagccctggacattgtctgcacacatagacaccaaacttttgacttttccaaagacagaattattttatttgtttgttttttaaaaggcttggtctcactatgttgcccaggctggtcttgaacacctgggcttaagtgattctcccacctgggccttccaaagtgctaggattacaggcgtgagccgccgggcgccggccgacagaattgttaatgagtatatattaagcatctaattgtgcatgctgccatctaagacttggccagttatgtgggcttggtgcctagcctgcaggggtttatgctttgcgaaaacaagcccacctccccactgccctttttttttttttttttttgcaacaaatgggtttagttgcacagtgcccagcatgggctgctgtccggcaactaaagtcgtggttgagagtatggagaagggatactgttttccttccatttccggtagttgctcactaccatgaccctgttgttgtgatagctctttgctgtcctttctacctcaccttcaccctatcctcagctataataccgtttagctttgcagattaggagctgggtgaatataatggttcgagtgaatggatgaatgagaatagtcattgtaggcactgctgaggctttttcatacatccccacatttaatgtttacagtctagcccctccatttacctaatgggtgactgatactcagagaggttaagtaacttgaccaaggtcacacagccagtaggaggtggagattgggatttgaacccaggaatcctgtttgacgatagctccttgacccctaggtgggctcctgcatttgtactcaggggcaaggcatcagtagttggcagagatcttagcttgatgcccaaggccttgctgagtagagaagggagttcaagagaggcttggagatggtccctttttggagcaacctctgactgcagggaggtcagttgagaccctggacaggcatccaagcatttggaggagggttgatgctggagcaggagcagcatcttcacaggctgtggtcactcctgagctgggggaagccaccctgcctgtctcctctccctaccccatccccgccttagttgtcagtgaatgcggtcttttctgagctaattagaaatctcaataggatcgagaatagctgccgaagacaaacgccccttttaagtgctatcagtgcatgggagagggggcttgcagaactgttcttagagcttgggtttggtggctccggctggcagcaggaagcagtggttgtcaaggccttacggcagctagcctggggaggacagcatcccaggcgaccttcaggatcagtgcaagcacagatctccttgacggacacccccgtttgggacttgttcttctcctttgttaacaaaagtgcttaagaagtaaaaattgagttagtataggaaacctgaagtaaataatgctggcttcagctatatgcaagctgttcctcacacactgtgcttttcattgtttaaaatagcaaggtttggatttgggggggtcacagggaaagaacacgatgtctcttttacttttgtttttgttttgcctctttttaccttttcttttccaaaagtaatttttgggacagaatcagaagtgaagcaaaaatccaaacgagctctccgttttcttaatacctgtctccccttgtctttttctgtcaggtttgaagccgggctggaaaatgttggagattttcagcctggggaagagtcgaggttcaggacatttttccttttcctaggaaaactcagagcagggttagacagttcgcacatccaagaccaacacgcataggcacacacgtagccctctgtctagggcctgattcagtctgcattcgagagtgttctgaatgagagcactgtgttggcgtcttccacaccagcctcacttcacaggagaatttttcaggagccatttttctattaaactcaagagcagaaattgatggggggatgggtgctctctggagatgtaatttgaatttatttattttaatgattaaagagaaagaatggttattattcacatgaatgaccttctcccggtgcttttttgaaaggagttgtgttggtttattcaaagtggcttagaactcacataatggcttacttctgtggagctttctgaatgaagccatgaactgggagggaatcaaagtccccttatttcagtgccgggaggtaaatggataggggacaaaaggagcaatattatgtctcagactaaataaggtctccagatcaggggctgaacctgccccggctccatcctgaattcttcctgtgcgggtaggtcctcactggactcacctgggctggagaatcagcttggccacagactcctggcttggtgtgagcctcggggattgctgccggagggagggcggaggtctgtaggtggagaggtaggttcaggtgggtggagaaggcacacagaccgccgtctgggatgaggttgctattggattggaaattgctgttcagccgagggtagaaatcaggtgcctgatgtgtgccagttgctgcatgacgtctgccgagccccaggtgcacccatggggtcatgcatgtacacacactggtgttcccacacccccctcttcctgcactgccatgccccaccgcccttcccccacccactgctgaagtcttagctttcaagtgcaggtgttgaggttaataacaagaagtatcccagttggccatttgcatatgagacttctcactgggttctaaaggtgggaaggaagggatttaaaaagatcacgggcgtgaaagctggaaacagtggcgtccattgcttggggcaaggattgactagaggtgattttatgtgctgaccgctcctgtagaaagagaagcttaggcagatgtcatgccctgcctgtgcccacccaacctttctccccctggctggagcactcactccaagccaatagcccagcttccctggatccctcagctccaaagggttgcctcctactccacttgctgcatagaggggttttctggaacagagaatgtgctggacctagagcccctcgtcctggggctcaaggacccagctcatgtgaccttcagcaggtctctcctgctgctgccccaggactggccacacaccagggctctgtcccccgacttcctcactagaccctcaggccatctggtcgtgaggtttttactgctaacgggacagagtaacgcacataacccatgggggagttgcagcggtctaattgaagttcagagtgatgttcactggtctgtaattcctgactcccttcctgagagagtcctgggaactgagcttggctttctgcctgctgcttgtctctgattatggagaccagccagcaccccccaacccagccccccactcactgccctgctgcatccagcccctgggtcttccacctcctggcacgctctagcctaggcctgaagtagcagggccagacgctaggtgtcgccgtcctggacctgcctccatccccggaggtcttggctcatgggctttcttgatctctgagtgtcttttttaatccctattgcccagcaacggcttccttggttagagacagtctggcaagtttcctctggttcaaacttacgtttgaagtttttctacaaccagaaggtgattctctggcttctgagcttcacccaaccctctctgagccccaacatgggggaacactggtctcttctttctgtgactggtcatcttttacagctttgattcatgctcttagtttccagttttatatgtgcttaagcattataagacacctcagtatttttaggaaataagtggggacataaatataaacaacccggaaatcactgcccctagaattcacagagtggaagaaccaagctttttagggctgatgtggcgtgggctgggagacttctcttttgagaggctgatactggtctttgaatgaactctttaccccaccaaaagtagaaaaaggattccagtgacttcagaaatttttgttgttgttttgagaatgttggcaccactgggaataatgagagacgcctggcctattcaaaagtggcatcagaaacctcagtgttggaaatgcagcctttggttgtccatccccgcagctagagcatgagccccccaaggccagactcgagggctcagcgcttcagttgagtagtcctgattgaactaggctcatgggcacagagcactggactggggaccatagtggatgccaaggctcgaccagtgcaaaatcagcccaaactgaaagctgtttgggaaggcagaatgaatgtatcatctttcactcggcaatttttcaaaattcagccacaggtcttcctggacccctagccaggttttgattttctaggctgggatgaaagatgaaagagacgtttatttggtgggagggggattgggacattgagctgcttttaaatgatgttaagaatcccattcttctccctgctttcccacttctgccctggtgttgactttgaaaaaccttccaagacaggctgaggctaaggagatgggggagctttcctgagcagctttctgaggtccgtttttttcttttgaaatagactggaaatctatctcggctctgaatcatccttcgattctcatcgcggaggggcagagaggagggtgcacgggcagcccagctcatgtgcctttgtggccatccctcctcctggccaagagataaccggttgtttttgaaagtcctgtgtttatcgcgagagagcagtgtggtcagagaggcggtgaggaaagagccggcagcccttctgtgatggatgggtagccgacttttcttgtgaagcaaaggcagcccacaagtttgtctctttcaagagaagaaatttaaagcaaagctccagagagagaagttttttcagtctggtccttcatgtaggcttaacaattctaggagggccctgaaaatggcagagacctcaattctcccctccctccctgcccctttatgggctccctaactagagaggtttgcaaagcttaaggggattaatgctctttaaacctctgcactccttcctgctcctcatgggatccgggtgctaataaagatgtactagcttggaaaggctggtaaacgctgctttgttgccacggcaacaggcgaaacaagaacgacaccaagtattgctaagaagagtccttaggatcaagagtttggggcgggggaggggggggatggttcttaaaaatgcagagagtcttggcaaggtaattagacttggtgctctcaaagtaaattcatagttttatggagcattactagagagccttgttacttgcaaagtcaccctccatcaagtagaaggaacagctgagagccgccagcatctgccgccagttgctccagtgaggctggggtgttgcgtcctgagacaccatcccccctctcctcctcagcaagtagtcaatgtgtgcacacgcgcttgtttgggaagcgttaaaaagctctatttcctgcctccttggtgttgaaagatatgagggaatgttctacacctgccttctatccgggatgatgttattgtttttaacaaggatgataagacagtagctaagcactccgtaagcctgtgtactgggctgagcaattcttttgctttatctcatttcaccttcaggctgaccctgtgtggtgtagctgttattatgcctgttttttctgatgaagaaacagaagggttaaggaacttgcccatggacacacagccaatgacagagctagggtctgaacaggtgtggctataaagcctgggctttggcccgtgggccatatctttacagactcacaaccatcccttcctgctgctcgaattttcattcttgaggcatgagcagcgcctgcagcccctgctgggatgttttgctcaaacctgctgagacttccaagggagcctgggactctgctctcctactcctttcctcccttgtgtttgggcactcggctgagctccttggaaagatttctgcttcctgtgggtgagaagtagggcagtgtgaggaggcagggctgctaggctaagatcccaggctgccccactgacccatgtcccttcctgggtaatggtgcccagttgctcaagccatacctgaggcttcagcccgggccccatctcccacacatctagccagcgtccgcaccgccagctctgggtcgccctgtcctctgcacccaccgccatgctctgtttcagacacctatcccatctgtccctggcagagcagcaactctccggggactcctgcctccaggcctgtgacccatttagagggatctttctgaaatgtgattctggtcgtgccaagtttagtggctgcctgctcaggcgcctcagtgtggcctccagggtaggcgtgatggagcctacctctccattccctgtccgctggggttccctgctcagcgcagcagggaccccagcagctcctcaaccagccaggttccctgtcaacttttgcacatattaacccctacccacctttcctttgataaactcctgagggtcctcagatgggtgccccttcctccctcctgaaccccctgagcatgcctccatcattatttccctacactgactcccccagttactatgaggatcttaactgcaggagaccatattctgttcctcttggtgtccccagtacctgggacataataggtacttggtatatgcttattaaccagaagagtgatggtgtttatcctcaccaggttgctatggcaacagatgctgcagcccctcgaggccaagtgacttgagaccttggaggtccaaaggtcacacaactaccttcctggggccccacctggcatcctcctctccctacagccaggacaggctgcccagcctcagaaccaccacttgttgtgactattaaaccccatgtcccaatgatgcctggagaccatgcctcaggcactttacactgttagtggtaatggtgacacattatctgagttttgttgcttgtaaatttcttttatgctgataagcttggaactggattggaattgagtgggggacattgtccagtgtccatcaagaatgtaatggtaaacatttaatgtttttttctccttcttccccacagtatcagttttcttattgaatttgggaagcaatagcaattgattaagttgcagtggagcttgccctaaaaggaaatgattgataatccgtttaggtctggcttgctcgcttttcccctcctgatttccttggccactttttcaattaccaactgtatttagcttggtttgcttgttgtaactcatttccccttcctccaggatctgcagggaagttgtaatgtaatgttagagtagtgacatctaattatttccctgagacatcagttagaaatgtaagaatacttcttccttgaggtgggcagacgagggatgtgagtctgtgaggcagaacgtgtctgtgctgccatcagtctttggggtgggagggaggtcagggcgtccagtgacatcacagcctcctgtcactggactcagagcccatgtgggctcctgaggcaagctcataggattgttttgcaagtggactgattggctggttgggtctttgccattaagtgagtttatgaggccctcactactgggagagaggctttgcagaggcttgcggcactatgacgagggtcacacctgatgttcagagctttttgtttctttagctaatatctttaaggtaaaaccatctacaaagtacttttacccactcagtgacagcttgagatcctcccaacagtactaataaaagaaaggagaaattgaattagcagctatgtttaccctcccaaattaatatatgtataatgtctggccttatttggtgtttagtaatgcatgctgtcatggccaccttctcagtggaagcaccgggtgtgggatctccctgtttcacaggtggattggctgaggcctgaaatggagaagggacttgtccaagatggttcagggcatggagtatggagcccactgttgggatcgccaagatgcccgataatagcgttcctcatccctgcctgaggagtgaacagactgaggggtaagccaaaggcatggcagatggtacacggaaatatcaccttcttaagaaacgttaacgatgaggggcaggccgcctgcatgagaattcctcagtcataggcaaccagatgggaggtgggctgacttacatgggacagccagggcagcatcttgctacctctttttacgcaagatgagtccaggaatattccacacaaaaaaagcacaggagtcactcaggacctggaggcttttcccaagacatcatgatggagtcttcagggtctgccccaggggccaaagccccctttcccgctcctgccagactctcatgcataacaagtttggaatgaatttggcaatgccatcaccacccagctcacttctcagttactttctgtttgctgtgtactctggaaggtgtggattacccagggagaaccctgccttgaagggtgtgtggccagggacaggttctctgggctgttggctggtaccccacagccctgggctggggtgttcccccttgtgcccatgccaaggcaaggctttctgcgtggaagtctggcaggtgtacattcgctccccagtgggaatggggagcagaggtttcgttgaggcatctcttgggagtgcacagtccctaatttctgaaataccattgatgagaagcagccccagtttgggtctgagttaatgggttaaaagagcagaactgttttcttgggcgctgaatatttcttctagatgttcaggtccataaccaaggcagctaagtcagcgaattgtcagcattccagaaagaagcgtcatctccttgggtgctgaggacctccggggctgcagctgactctgccctcacacaccctccttcttggctttcatgatttattttgtcaagaagaatgagggagttaggagtggcatctctcataacagcctcctcccatcttctgagagtgctcaagacggagcttgcctgctgctggcgtggggagctgacaaaatatttaaataaaggctctgggggaaaaggacatgcttagattacaaagagaaattccacgccgttatggtctcagcgtattaggcgcctctgtaattgcacctattcagcactgccatttctagtcaccacgcagccatccgagggaagacggatgctctaaaaatggccccgagaacagtctttttaaaaaggcagttaacgatctggagctataaatagtgtctttccaacaaataacaaagagggtcggttcccctttcgcctctgctgttgaggccccgcatcctggagtaagtgagtggggtcaggagggtttgcacctcccctagagtttgagttcttggaggcctgatgacacccagcgtgttgcctagaggtggggatgagaccctggctggctgaactgccgctcaccgtgtgtttttggagacacatccctcctggtggcacaacagaaaaccacgactctaagtcacttgccccagccctctgacctctcttcagcccagaccagcccttctgccagttataaagcaccagccctgccaagagcaaagagaggcttgctggatcccgctgtctcttcatggagttcctgaatcacagaacctcccagtttgtctgtttgcctcccatgtatcaagaactcagaggttcagccaagcgcggtggctcacgcctgtaattccagcactttgggaggccaaggcgggcagatcacctgaggtcaggagttcgagaccagcctggccaacatggtggaaccccatctctactaaaaatacaaaaaaaacagcgaggtgtggtggcgggagcctgtaaccccactactcgggaggctgaggcgggagaatcacttgaacccaggaggcggaggttgcagtgagccgagatggcaccactgcactccagcctggatgacaagagcgagactccatctaaaaaaaaagaaagaaagaaatcagaagttctttgacatcattttaattcataccttctccaaatcagaaccacaaaagcagcattacctacacccagaatagacacagacatcaacagaagcacaaagtgagatggaaccctgtctcccaacctgagagggagagtttgggctaaaacacgcccatgtgaggacagcatttggaaagttaatgctaaggaaataagaaggatgggagtaaaaagaggacaagccccgatgtcctgtttatcagctccccctctctcctctcctgtctcatccgctcccgccttgaggatagcgtggtttccctggactcctttccagaccagctgcagccccattggcaataccaacttccctagctggggttggctggacggtgtggttcttggcagaagatgacacatgggtagcagagtgactttggctcctgcatcgagtgcttgtctcagccccatccatagccatatagaatcctagtggtgaacatgcaacacccctgagagccactgaccaggcaggcactggggtgagggaaagtgaggggactgtgtgggaccagctgtgctgacgacagcctgccacccaagggatgcctgtccctgcaccctggctttgttcctgcacctggtccccaggaagccaaatccagtgcatttttccagcttctgctcagagacagccagtgtctgcagaagggccaaggccactggacgtctggagagagtctggccacaatggccaagtggtggacgtctccacaggctgccccgtgcccctgcagaggcagggcttcatgaagcaggagcaggcagctcagacctgggccgggccacctgtgcaggtaactccttcactgctattggtcggtggaattgtaagatcagttcttcagcaggatgctgcgggttttctgaggcccgtggccatctggatttgtgctccgaacatattataccatgttaacagcttttaaagtagaaacacatgtgattctggaaggctgggatggggcaatggaggagactgtttaaaattgctgtttggtatctctcgtagtacagtagcaaaggtaaaaacctattatggtccacggaagcagttcattgcgtaatgacatcttcataacttgccctgctagctggcttttctcacagtctctgcggggaagttttgttcttttaaaatattttctggggtggtggagggggagagtttggaggcgctaagcccctccactgaaactcctgggatgggggacttgcagtaacccgtgcccctccgaggagccctggagcggggttggtggggacacttccacccacttccatggggatttacaaggtctgcttcatggacattttcaaaactcttctctctgctacttcctcccaccacccccagatcaccacgttttgggagaagagtggttgggaaacaaagactcagatatcagcctgccttttagaaatcccagattttaaccacctaccagctgagcaaccttaggccagttatataatcctcagagcctctgactccttatctgcaagatggggtaacagtaacacatgcctgctattatttattactgatgttgctgtttctgagcagtataataatgctgctattattaacaattactgccggtatggagaggagtcattagggcaatgcctgtacggttcctcgcagctcagtaaaggcggtggttgccaccagcacaagcatgccttgcaggttggttttggttatttaatctttgccaagtaatgcattgtgggtttctgttctgtgagcatcccaggaaaggaggcaagccagtttcgccccagtggaactggggcaggaatagaggtggaaagatggaaagcccaccatcctcccagctccaaaggagctgctccctgcttcaggggaaatggtgactttccagagcccatctagctgatgaagcaaatggcggtgaggtcggtgccctctgcacaggctgatgtgcacatttagggagtcaagtatggaaacctcttgttcttgcactgtctgttcttgagcaatcatgaagagacctcacaatccagaagaaaccaagcgaagtgatgaaaccacagccctgagatggagagatggcggtgtgggtgggcctgggagctttgcacagggttctgtctaggtggagggtgggaacatttgatatttttgcccacctgcctggaacacactgtatgtgcagttgcgtcacccatgtctcagtccctgaggcctgtcagccccaagcaggccccagatatcacaaaaatccccgctcttgctctcccgtcttgctgttttctgaccccagcatatccatttctgtgcggtttattctgagaaatcctgtgtgaattgtgcttgaactagcgggtcagagactgtctcccacctccacccccacctgacctttcatccagactgcaaacaggaagcaataagaattgtttgcccagttgctgctttgatcttctgggccccttttggggtaggaggctgtgctaatgaggaaacatgggccagaagtccacaggcaggggagctgtgaggacgacagaaaggtaggaaacccgcagccaggtgctccaagaaatggtagcgtgtgcccaagagcagtctctgccgcccctcttgaagcagcacccctttatccagaggggatcggctgcatgtttaatgagaactttagaggcctggaaggtgcctacctaagcaatagcaggtggcagtggccccattttaaagatgaggaaactggcacccagagaggattggttcagacgttattcgaatttgcagctttggagcccaacaggcctggattcaaattccggttctttctacttattatatatataagctacttaacctctctgaccctctctgattttcctcatctgtaaaacagggataagaacacttcttcagatgtgattgctatagattaaatgagggaacatatataaagagcctgatatatagaagtgtccaataaatagcagctgttgttttccatttatctatccatctgcccgttcatccatccatccccatccatctgcccatccatccatccttatatcccttcacccatccgcacatccagtaaacagtgattggtaagccaagtgctgtggcatctcaagatgttcagaaatggatcctggccaagaagcttatgtgtctagagacatttctaagaccgtacttcccaggcctcttctcatggtgctttcatacacagaggaagcattcttctcttagcaaaggcattgcctgctggtcccaagcaactcctaccctgggcactggtgttgcctgtggcctgaaaccagggatctccctctcctaggcgactggaagtgcagagctgcgtaacacagcccttcttagatctgtgctgtcgtagcacgcgacagtgggtcccagctctccagcagaatgcacccactgctgcacatgctgttggccagctttctggagggtggaggagagccatcttttaaaaatactatgttgggaaaaaaaatacttctgttttcatttcaccaacataaaaaaatgtagtcactgcaaacactgacaggcaaactggtggctaacaaatcagatcctcagggactgcacgaatggagagataagtcttggtgtgtgaattgcacacggactatttttttttccttttttaaaaatgcgtacaggccgggtgcgatggctcatgcctgtaatcccagcactttggaatgccgaggcaggcggatcacctgaggtcaggagttcgagaccagcctgaccaacatgacgaaaccctgtctctactaaaaatacaaaagttagccaggtgtggtggcgcatgcctgtaatcccagctactcaggaggctgagacaggagaatcgcttgaatccaggaggtggagaatgcagtgagcagagatcgcaccactgcacgccagcctgggtgacagagcaaaacttcgtctccaaaaaaaaaaaaaaaaaaaaaaacagtgcatagatttgtggggtccatgtgcagttttgttatgtgtataggctgcatagtggtctagcaggattttttttatatccgtcacccgaacaacatacattgtacccattaagtcatttctcatcacctaccccatccacgtggaccatttttcataccaatggctgcacaccttagaggcttgctctctttagtgatttaattgtttctcctgttggttcctgtggaaagttctgtttctctccagccctacacttggggaccatttatactcactcaggctttcccacagccctgtgagataaggacccttgtacacatggaaaaacttgagagcaggtaggccactgcccaagatcccaggcaagctagaaccaagctgggaagcgggctctgggcccaggatcagaaccccaaggcccatttccattctatccccaaaatagtgaatgacattggataaagcacaatccatgtcagtaatctccagtccttcctaatgtggactctcgccttccagcatttaacatacccataatggccccattttagtggctgactgtctgtctgtctgtctgtctgtctctctctctctttccctctcacacacacacaggcgcgcacacacacacacacacacacacacacacacacacacataggcctctgtacagatggaccctgcttccaaaatggagagtttgcattttcctttcatccctcacctcctagtccccaggccctccgccctccctaaagatgctgtggtgaaggggttctggaagatcccattgtctggcctgttacacgctctgctgaacagcccacctgagccagaatgggcctgggcacctcctctgaggcgtgtcacatttcccaagcgcagcctgatgaataggacgtcctttatggccagccccctgcacgtgtttctctctgtgcagctgatactgttgtgctcaagacacaaaggcccccatgtccctggctgcccatcctctctgcctgtgtgaagggcgtgccatgtgtttgtggatttcttgctggaacagggcacagatggctgggtttgagtgcagcagtaattaagaattgcccaggagctaacatatttatgggcactggcccaggacagcccagaaggtcgccttgtaatcaggcatcacgtgactcctaggagccagttaacaatggtatggccgtggcttgcatcctctgccctgtgcccttagagggttttctttttaattggggacatttctgaatgcatttgggtccttcctctgctttgggggaagctctgatgtttctgggcctcagtgggtccaagtgaggtggcctggaaaccaccagtaagcacacgaggttggggtgatgatgatggtgaggccattctacccatctcatggctactcaaagtcagtattgcagtctgagtcctgggcagggttctggagacagtgctgctgtcaggggagctccagccctaataggagactatttagggcatttatggagcttgcagcctgtgtccagcacagtgcacagatgtataaagtgtctccctgacctttggaattgggagtctcatcaagtatgtggttaatgctaaattgtatggtatttcctttgcttgttcattcaataaatgatgcgagcacacagtaggtactgagtaatgcagttatgaacccctgctgcactcttttgtctactcactggcacttacatacagccttttatccattggacagtacctcttggcgcaatcgtgacgccttgggttgttggttaccattctgtgcgtttatctgtttcaccaccttcattaacaacagccgtttatggggcacctaacagtgctagatgctgtcctgagtaccttacatatgttgccttatttaatcctcacagagttcctctttgacagatgaggaaactgagactcagagacatggttacttgctgaagacacagaatatgcatcaaaggtggtctgacttgagagccagggtgcctggtattcggctgtgccaccccatctgcatctaaggatttttttgtacaatccacagtgcctggcactgtgcctagatagcactgatgcttccagagaaggaagagatcatgctggatttcccatttttctgtaggataagcacagcatctgaattcggttccagccggccttcccagcctcacgctgtaccattccctgatcttgagtcacctgatcctgcctgtagtttctcagtgcactcagtgctcccggaggcttccctgactttgcacctgcccttgtctccacctggaatgtccgtccctgcccctttgtgcctggaggcctcgtcttctgtctagaataggtggatgccacctgcctgaaagccttcctgcattcttgcagacagtcatccttccttttgtcctgctccatcacagccttaccagttttgtgttgggattgcttgcctgtccctctcctgctaaggacagggcactctctgaagacaaagacatgttttattttataccccctcgactaacacccatgcctggcacatcagccaggctcagcagacagttactgagtgaatgcattcattggagcagctctgtggagcagttgaagctgtatccacctaggctttgaaagcagaggaagggaaggcatttcaggcagatgcccccttcttgctattctcctctttctcgggctccctgggttgggtgaaaattggctgtagacatgagacacccctgttgcctcctaagtaacatctgtttactttcccagggagagtagcgatttacgaagagcaaatggaagcgaaaaccccttttcttctttgggccggctgtgtattgctggggcacttgggcagacccccaaagacatccttaaagacaagagaaatcgggggctgtgtgaagatgtcacatctgcagatagggttcgaggtagagcggccttttgggttttctcctcatttggagaaatcgagaagtagcacggaagaccttcagacccagagcttgtgtacggcacagtccttgaaggatttgctcccattctcagggagcaagacccatcttaaacgtggaaacaaatacagcagagtaatacatacttgaggcttaatgtaagttaattcctcttggcacagccccagatatcttgattaaatggtctgcgaagtgctgagatatcttgataatgtacgttttacatttgattatataatcaattatgtttctcctaataaaatttaaaatgagctaaaaaagccatgagaagacagtaccacatatcaaaagaaggtctccagatgaatggaaggaagccctggccccctgggtcacatgttggtgttctcaggcattggggcccggtatttcctgcgtttacctgtgcagaagtcatcatagcttactagatttgtgttggtagagggcatgtgcagagtgaggtatcatttcaagacacagaatatagcgcagcattgctttctgggatgaacgtggttttattcactcagtaactgagagattgaggatttggctcatctcaggaagctcaaggcagagctgagaaaagaactcaacgaagctgggcttgcccgagagactgccaccgatctggttggggccaccagtcaatttatgaaacaatgtaaggaggagtgttcagaggcgcaccaagggcctcgtacagccaattaggagagttgctggtggctttctctgcctgcctgtgaagcagcagtgcccgctggggaggtggcaggatttaatagaaggggcatgttcaaacccattcttccagggagtgtaggagaaggacctgatgagtcttcctatccgtgccctggagggtgatgtttctccaaggatgcttccatgtagcagggagcttgggaggtttgggggacaaatgctcgttcttattaatggatggaagggtctattccagacaatccattctgtcccgcagacaggctgctgcaccatttttgtttccgtttaaaacattgctatcaaccagttggaatataggcccggagtatcgcagggagtaatctaattagtatgaagtcaattcagtcgctccttttgtatctcgtgattaaataagtggggaaaatggcttgaaaattaggtgctagaacgacccaattacatttctgtagctttttgtattcaatttcataaacaattttgctcttcgctggttaatcagtgaatgcctttttccagtttgaaaagcacttttgaaattataatgcaattaaattgtgtgtggatgttctggcatagcgagtgtgaaagccaggggcttggcaggccgccatgttgtaccttgactgtaatgagtccctgggctggcagcttgcgagtgtcattcataatattgtccatgctgggttactgtaaagtgcagctgccttaaccggcagttaaccggcgactgccagtctctctctgcagtgggctgtgcgtgcctcttccaacagggctgtaccccaaagacggcagagtggccaggctcctctcagtacttgcccaggcattgggaagtcgggggtcttcctggtggatggggccactgcctcagagatgatctgattacctgtccccagggaagggtggaatgtatttatccttcttcatctccttggcctagcaggcttctctgtctacagttacaacagattatgggaaggggaagggaggagacagaagtcttaagcaccttgctctgcacctagcttacaataaatacctttactgaatccttccaataacctttgcaagagtagtattactgtctccatttgatagatggagatattgaggcacagcgggatttgatgacatcccataagtggtggctctgagattgggacctgaattgatctaactccaagacctatgttctttcagcatttctgcaactgggaaacaaactgaaataaaggctgggggagctgggtgcaggagagtggcatgaagtcactgctctccgagaggggacgtgaggacatgaaccttcttccttaggctgggagaatgcctcttggtccacacaaggatgccatatagaaaatgaaagatgctttagtttttcaccaaattatatttaaccatatttccactcctttggacatttcgatgtgagttgggatgatctataaggtgggcacaagacacaagacagtgactcaaggctgggatcatgagaagcccctagggaaaatactggccatggcataatccagtggcacaatcctgtctcagtccccagatcttgccccaatcaagaacaaagactctcgtgcctctagtgccttaggatatgaggcctgtagaaggtggtcgacccccaaagggcctcacagcaggaggtggtgagatcactctgattctagaactttcttgctgattaatggctcaagtcctaacagttaacacctagcctccacctctaatccccttcttccctattgattctttttcctgatagaggccttcacactaaacccggtttactgcaaatgagtgttattaaactcctagagggtgcttttcagcacattccttcatgttaaaattgccatagactttcaaccaaaggaggggagtacctgtggcctggttatcgtaatgcttgctgagtggaaatgacaagctttacaccaaggtgggcctccagggggctggagcactgtggtggtgtttattggtgagagaggaaaggttagcaggtagaagtgaacacacctgggcctggctggtaccggggagaaggagggacagagggagaaatgtcctgacctaccttggacttggggagattgtttcctgttgtagcctcttttaaaaatttttttgactgtgtctgggagatcatgggtcaggtgcaacatctcttttgcagtaaagcttggcaaggctagggtggggaggtgaatggggtgggacggtggattagagagaggaggggagatagggcccctgggactaagcttagatttagctgggaagcatgttagtagctgccagcatgtgcttctaatcatctattcgccagatgttcccggaatgggaaatagaggggccttgcctgatagttccctgatggaaactggtagcttcaaattggaaatgggctccagtttgctgccaggtgtttgctccttcctagaacatctggaaggaggacagtagaaaaggcatctctgccccagcctggagttttgcgggcagctgtcttgctgatggatctctgaaagctggacattgtggtcatgaggagagtcatgagaatcttctgaaatgagccctccatttgcaggagttcacctcagagtttaaacttccaggattgagcctgaggctccaaaacagggcaccttgcaagcctgggctaataaggcacctatttctggagagatgcagatttttcaagatgttagaggaagaagcaagaggaagatgaagaatcagctcctgacctaatttctggtccaaagtgaaaagattgaaaaatactttttaaggtggtgactatcctaaaccagtgagccttgtggaaattccatgaggatctcacagggaaaactggaccccgaatgaattaacatggaacccacctaaccacacaagtctttgctctgggtatgtggaaccaaaattatcttcctggctgaaatgaccagtttctcaagaattttagggtgcagtgcaggatcctaagatggtgtagcaggaggccactccctgggcctctgagtgcatctgccatcagtgggaaagggtgtgaaatctgccttgggagttacagggaggtcctcagcgtagacacgagccacggctgacacacactcaggagaacacttacaaagcaaactgaaaggaaattatgggacgctcatatgatggatgattacacatccattaaaatggtgtttacagagagtttttaaatgacgtggaaatgccgatgacatagtattgcacaaaaaagctataaaatttatatacgctgtgaatcatattagaattagaatcacctggggagctcttagagaagaccaactcccaggccccacctcagaccaagtaaatcagaggctctgagggtggcgcctggacatccctgtcttttaaaaccccccaggtgattatgatatgcaggttgggttgagagtgattgcagtaaagcagtattcatggaaggaaagaaattctccacactttcaccagtggttttctctggtagaggagttatggggtgggttgaaatctgtgccttaattatttgtgagttatccacggttttgcagggagcataggagctatgatgagaacaggggtctcttccagcaggtaaaaatggacagtgctggagacccaagtcgaatctcttctctgcaacactcttccctgcctgccttcttgtccccagtccttgggattctgttaatttggggatttatttcatgctcttggtgatgaggccattatgcctattcagattgtttatcagaaaagccaacaaccaaaaacaacctatttgagacaaagtgggaggcccagcatggcgcccactgcaattgctcatatgggtgtgacctgagttcacagggtcgccagagtctggcagcttgggatgcatggtatgcagaaggctgctggatcctctcttatatgggggttcctggcaggccgatctggcaggcaggtgtgtgagtcctggctgggttggctttcctcccaggacatctgggagaaagaccagcatgggaagaaggcagtcagggcagcagtgacggcctctggggcccctccccctgcagatttgagcaaagcctgagccacaggtgggctcagggtaaagaccagggtaggagtgtgcactcagccataattggccgccttgttgatgtattgggtccagtgaagagcctctgagcagagggatgctgtgccaagtttcatttctggagctgtggtggctctaactaggaatcgagcttttgcccagtcctgacatcatttgatcatttagctccgaggaaccagaggcaggaagcatgccactaaccttttactgcctgtcactgttgaagaggaggggcaggccgccctgggaaggggagaatcaatccacaacttgcttttgtcgtttgttaagtcttctctccccgcatttcaggctgaggggcctgaccttgccacctcagaaccatgagacaggaggatgcaggaaggggagatgctctgagggaatgtggcagcccccaccaggccccgctcctcccaggagatgggtttctggtggacctggtagtgttttaccttgcctttacctcacgtacctctggattctgaatattctcctctggttcttgtgctctctgaatattctcctcttggattcgtggtgtggtcaacgacaagggtcacctagtctatactccagtttcctcttgggttaaaatggataatcctttttgagatacttcatcgaatgatagtaaggataaagtgaaataacctacaggaatgggtttggaaagacagtgggaaagtaatagtaatgataataatgtcactttgagagcacatccagacactcctctgttcttttcctctctgttcccagctgggcaggtgagcagcttacaccaaatgggaaagccaatactttctacagccgactgcgtgcctctgccttccccgcccacatcaggagagggtcccaaaccctccctctctgcaaatgcccacttccctcatgtcctctcaatcccacctacacccaccctagttctccagacccctaaggaagggtactttatcattaggccaactaattgttcatctgtgcttcagtgggtgtggtgggggagctagaaagctgatcagccgtgccaaagagtaaatcaatggatcgtagccaagtcaggacaggtgaccctgacaggtgtgtgcagcagaatcggatcctcaagccagagcctgctgggaagcatgaaggatttggcatcaccaaggaggaatgtcgcaggtttgaataaggattcagaggtttaatcagcaaagctatttaggtcccagtgagtctaactgtgagaattattttgagcttcaccctgttccagaaattttgggttcgctaagcaagatggtatttggcagcagcaacctggaaaagagtgaggacttgccatagaagcctctgggattagaggaatttgcagagcctcagagcccaaggctggcgcccagtaatttttgtgggacatggtctcagaactctagcttctgacgatttgcttttaaaagtccaatctgtctgcctttctccttaaggcaatctgtcctgaattcaagatattctgtgtctgcttgtctttgtccattttgtcaccttgagacatggctgcagcctcaggtacctcctggcacataagcaggtgctaaaccaatattgattgaatcgaaggaggctagcacgttggagggaatgtgttgccttctgtgtaaagagccctcctttccccagagctggcatctctgctatggaggctgccacccaccagctcagggcagagagctgagctcggccgacctccattcgtcagcacggcgccacatttgggtagcacctgcttccccgccgtcctgatttagaggagcctggattcaggtttctgttgtaaactctatttttaactaaaccgagtggagatcaggctgagatggctgtaacttatgggcatgaggtgaccaatgcaaaggtaacaggatgcattctcactggaactgctgtgcaagtgtggacgtgcccgacaactccgtctgaggatcccacatgggcacagtgacctgggatggagcaggagtgccccctcgtagagtccagatgcacatgtccaatgggaaggcgagggcagtctcctagaatgcctctgtggtgggcggtacggtgttcatggggaccacttgtcagtgtctgcccttatttgtcagcattggttactagttattgtaaagatattgccttacatttatatttcccaaatgcattgatccctataatgaccttgaaaagcaataatagcgttataataatatgtaataatagtattaatgaccagcaacttctgcttattgatcccttaggatgtgtcgtgctctgtgccaagtgccctcctacattatcactcattaataaaccaggtggggaggctgttactgggatttccatttttcagattcattcattcatttgacaaatttttattgagaataagttctaggcacagggaattcagcagtgaaccacccaggctgaaatctctgccctcaatgaggaagctgagcctgttgaggtcacctgagttgctcagggtgatagagcccatagagtgaggctggggatcaacccccatcactccagacctgctgagttcctgggccaccacatttatcagcaaggataaccgaccagccattggcctctattatatggcagcttatccagggctgtgttaacactaagccttccatttattttggttgatcttccaggggctgatggaggagtgacaggctttagggacagacagacctgggcttacatcccagctcagcgactccctgatggaaggagggcatggacagtgacttgactttgctgagcatctgattcctcatttgtctaactgggataacattacttgccttgagggcgagggcaggctagaaggattagatatcatcatatgaaggggttgagtaggacttataagccaagtacgtggtggtggttgtgacgataatgatgacaacctaataagaaggaaaagccaggcggggaaaggaatatggctcatcctagaggagaacaagtcaggaggtagctctacccctccctccctgggctaggatttgtcagtcccaggttgggaaaggaactccagcccctgcacatctgtgtctccccagccccacccctcatatcctccatcctagccccagcaatgccgctgctcctctggggaaagctaatggccaaggcattacttaactcctggcttttctccagcctttgctgaggcctccaccactgccagcttctctctcgtcactatttggttatgttcctttacaagccaatgaaataaaataagaaagtccattatacctctggttggcagaaaaccaggagctaagaaccagagtgcaaaggccctcatgagtctgtagcacaggccattggatggggatgtcttccttcagaaggatggtgcatgggcggggcagggcggagaagccagcccatgggccagtccacagagcccaggtcaaggatgcaattctgggtcctgtgtccccatggttgagcctctggtggccacccccagtctctcctagaaggtttccagcctggatgtgtcaggctggcatgtgtgccaggctggatgtgtcatatggggcacagcctttaggcgcagcagtaggtgaccctttgtagggcaagggtctctctctgagtgtgggttctgtcctagcttttgccatctatcttctaccaactactgtggagcttcggtttcatcagtcttaagagatgagcaggacagatggctctgccagccttcaaagacacaaattctgcattctctctctctcttttttttttttttttttttgagacggagtctcgctctgtcgcccaggctggagtgcagtggcacgatctcagctcactgcaagctccgcctcccgggttcacgccattctgctgcctcagcctcccaagcagctgggactgcaggtgcccaccaccacgcccggctaattttttgtgtttttagtagagatggggtttcactgtgttagccaggatggtctcaatctcctgacctcgtgatccgcccaccttggcctcccaaagtgctggaattacaggcgtgagccactgtgcccggccgcattctcttttttaactccctccccccgccaccccccggctggagcagatccctgttctggctggtcccatcccctccacaagcagcccatggacactgaagcttattcctggagagaaagtgattgggagatccagggttttgcctggcttatagtttctgtggcatcatttgccctagatgctcaaacgtcctatcttgtcggtggaagtggcaaaaccacatttgacaccgctctaggtggcggctcaatgggagtggagtgctgcgcatctcctgtttgacctttcagtcgctgcatggctcttccaagctgccgcagcctggagaaatgtgaactttcaccaaagcctttgcaaatgagcttttccagacaaggcagatggctttgtttggccaggcctgaggaccccgggattgacttcctttctgctctttcttctcactgtcctcttactcccctgcacctcagaccttcagctaagcagattccactccccctggcccaggctctgggtagaaattggaaaaggagccgggcgcggtggctcaggcctgtaatcccagcactttgggaggctgaggcgggtggatcacgaggtcaggagatcgagaccatcctggctaacacggtgaaaccccgcctctattaaaaatacaaaaaattagccgggcctggtggcaggcgcctgtagtcccagctactcgggaggctgaggcaggagaatggcgtgaatccaggaggcggagcttgcagtgagccaagattgtgccactgcactccagcctgggcgacagagcgagactccgtctcaaaaaaaaaaaaaaaaaaaaaaaaaaattggaaaaggaggctctggtggattgaagaagcagccctggcgtatttttcttacttaaaacttggtctgggactaactgcctctggtcagaactgatttagtttttaggaatcatttgtaagacagacactgtgggaaggccatcctttaaagccattgattcctgtaataattatttgctgaacactggctctgtgctgggcacttatcaggggctgaggatatggtggtgaacaaaaccaacagcagtcctggagctcaggctcaacaactctattccttgcacacattctagccgtggagaatgtgggttgtgtgcttctcacagccttgaaggcaagggctggatcctactctccattgtatcctaaaggcccagctgagattctttcatatagaaggtatccaatgaatgtttgttgtaggaatagatgttttctgtatttcctaagactctaaaatgaatgttacttttataatcagaagaccataatccatgttggctgggtgcagtggcccacacttgtaatcccagcactttgggaggccgaggcaggtggatcacctgaggtcaggcgtttgagaccaccctggccaatatggtaaaaccctgtctctactaaaaatacaaacattagtggcacggtggtgcatgcctgtaatcccagctacttgggagtctgaggcacaagaatcgcttgaaacttggaggtggaggttacagtgagctgagatgcgccactgccctccagcctgggtgacagagcgagaatctgtctttaaaaaaaaaaaaaaaaaaatgactataatcgatgtctaattttaaagaaaaaaaaaaaggaaggttgggcagggcgagattttgacatggtttataggaagcctggggtttttttagttgactgttaagttttctttgaggcaacaggtgatggagctgctaaggacgccaccacaaagggaagtccagtccggtatttggttgcactgctcagaccccatgtggaatattccattccaggcatttattttaagaggggcattgacaagatagaccacatcagaggaggtcgtctgatggggaccaggacagtattacgggaaaaattccagaggaaccaaggagactcgaataaggagaaatgaggtggctacgttagatcttgaaggactacccctgggaggggggccaggctgcttccccaaccatgagtggccgtttgtgaagttaccaagagaaaggctgatccttgggctgaagaatttagcaacacctcaagatgcccaactcaaacaagctgtgtttatgaagtaccgaggggtgatgcccctttccccagaaatattcagagactagaattgatgaggcagcaagatggggccagggaccactttgcaaaccactggtgggtcctgcattatgaaagtccagcctggtccaaaccgtcccatttccagacccatagagcccaactggtaatatttcaggaggattctgtataaaattatatctttaagccctggtctccagtagatattggtttaattaccagttatttactgccatgctcagtagatgatagacaagcaagagaaaaggataaaatgaaaaaaattaaaaagaaaattccaaaccctttgaggtagtaggaagagccccctacttgctgaagatgattaagaaataaagagaaagcttttcttggagtcatgatgtaagcccaaagggaaagtaggttcttatttatgaaaaaaggttataacttaagctgttcagaagcacagcaattacttggagtaagatgcctcttaattcatttggcctcctttgtaggtggctgagtaagtgtttctgcgtcctcggactccagcccttctttggtcgccacttgcttttgttcacggcaggtcactgggtactccagaggcattgttgataataacatctctttcctcccccacaccacccgcaagcaaagctttggaaaaacagccaagtgttcagcaaagtgaaggcttcgcttttcttcctccccgctcctccccttgttgagaaatcccattatccgggagaatgattgtgaaactccaatctgtctgccgctgagctgtgggccgttcttcttgcctcctccgcccctgccctggtccccttgtctatctgcagggggaagacaaatatctatatattaaagctttaagaatctataaatctgagttgattctctgctggtgacagcccaagctctttcccaccacgtttgacatgatctaatgggtttacagttgtttgagtgcttctctgaagcaaatgaaagtgcttagttaggggacgtatgaaatggcattgtttgttctgggcactacagcaaagctaggggatcatctttaaattatccaccctttctcttcagccaccccgcagaacaaggggctctgccgctgaaggagctgcaaagacagttcctactggccttgcctttctgcttgagaggtgccaggactgggggggtaggatgcatccccagctgtattcatttcgccaggaagcttggggctaattgggaacagaagaatgcccaggggatgaggggaaggggacgggagaaggatggtctcaccaaggtagaggagtgacaaatacttgcttctagcaaaacaggagtaaaaacaagagagactcctaatgagagctttggggcagtttgtgctttccattctcaggggccagcagtgtgggttggtgtgattagttgccttgctacttggcgcaaaaccaattcctcttttcaatatcaagtttcataagcgtggaacagtaacaaatcattataaaccctctgggactggtgggtgtgtgatgatgcggggttgtttttctttttccccctcctctttgataagcccatcttttcagcccaggtacatttttcccattgtaaacagaaaatggcatgggagggagtgtgtctcggaaacttgctgtattgttaatctgttattaggcaaaagtcttaacaccaggctgggtgctcagatgcctcattgtgagctggggatggaattatgcatcatgaataaaaaccgctgtcaacatgcattggtttcaaaacattagagcatatggtatgtgattatctgtattgtcaagtgcaataaagtgaatttggatataataaaggatgtaatattttagaaatttggtaataaactaaggaaaggatgacagctgaggttccttaaggccccagacacaaataaattgaagttactggtctctgtggccaagtggcagaatggccgtaacatggctatctgtgctcggtgattttcaagttggggaaagctctgctgtcgctcggttgccttctctggaggacgcagggatgatctggcccccatgctgggtggtgggagaggcggtggctcccgttggagacccaggtcttgcctccttgcctggcctcaaggtgtgccctgtggcctgctctgagtggcagacgcatctgcctccagtcaagggccgccttgtgccagccatcaggacatctgaggacccctctcccctagacagtcacctctcagttaatctccagccctctttgtccccatttggtcaatgggaagatgttgctgtaaacgcaaggaccctgagcagccgccccttggaggcagccgtcttctggaacccacatcctacagggccaaattattaagtcatgacagcaagtcaatataagtaatgagaatggtcctctagagaggcgtgagtgcttcagcatctgatgggggctaggaactgtgccaggcttcggtgtactctctccttaaatcctctataaccctataatgctgctgtccctatttgaaggatgagaaagctgagacacagccaatcagttgtggaacagagattacaacccatgtctgaacccaaagcccaggctccttccacttacaaccttttctacaaatccagaggctctttccattcatagtccacaaataataacccacatgttcagaaggcctcaccacaggaaactggaaacctttacattactgggtacctagggccttgaaagaatgttccagaaaaaaaaaaaaaatagaaccaggtgaccagctgtctcctctctgttcccacttgggcctagcaggggctgatctgccttcattattcctggggttttcccttagcactgatttttctgtccagctctagcagggtgaacccatttatcatcatatcctaacagtttgccttggttcagaactcatcttcctcctctgggaagggctcctgcccccaccaaaccaaagtttatcgatgaaggctgaggcagcatctgtttgcatctcctgactgactgcttttgtgtttctgaccctggctttaccttgacccctggcatttgacttcagggcttgccttggcccccagcctacaggaaaccccgggtgaggcctgccccccacaccctccacttaggcctggccccttccttccaccccggcattctgtggctcttccagtcctggcttccagtgctggtcttgctagctgccctgccaggtggacggcttcattagtaagcgtgaaaaattgggagtgccaccatcaggccaggctaaagcaatttggatggctgggaaaagagaagacatttagtccatttcatgcctggatacccctgtaattcctgggacaggctgggaagaggcttcaataaacccctctggcctaggaatcttgtgaccagtttgcactggagacgacaactaggtgagttcaaatacacttccaaatcgctcagctttggtacctcagaggtggctctgctaaagctcttatcaccgcagtcaacatttattgatagctaaagtattttcaagtctcagctggtagcccactcattccaagcaatattgggtataaaatctttatataaaaacaacagacttgtgcaggcataaccagaactagcattatctcatttaatccccatgccagccccatgaggtcagcatcttttttttttttttttttttttttttgagacacagtctcgctttgtcacccaggctggagtgcagtggcacgatctctgctcactgcaacctccacctcccaggttcaagcgattctcctgcctcagcctcccaagtagctggaactacaggcgtgtgccaccacgcctggctaatttttgtatttttagtagagatggggtttcaccatgttggccaggctggtcttgaactcctggcctcaggtgattccccagcctccacttcccaaagttctgggattacaggtgtgagccactgcacccagctgaagtcagcatctttattcctactttataggtggggacataggatcagggaggttgatggcttgccccacatcacacagctagtaaacaaccaggatttctacgatgtcctcggatccaagattcaaatcctcccagtccatggaatttcactcatctgtcttaaaagagtgtgttgctttctcctcctccccacccaaacccttccatgtaggttcttttgagtaggctacactgagtgacatctgagaacaattttctttaggaaaaagagaccttgagtcgctgtctcgtgagtttctcccagacacagtcttagaacatgtagaggggctgagggtgaaccccgaagaacacttgtgttcttgctccagatccccagggctgcccactgacaactgtccccaccctgctgaagagctggtgaaattgaaccaaatgctcctaatgatctgtgaatgtattaatcctactttctgttaattaacaatatgataaaaccagcatttcgtaagtcgtcgcttaacacatgttttagcaattatatacttagtggtttgtattcagaatgctaatagaataaaattttaatgaagatacgatgctatgaaaaatttattgagacgagttcaggtatggctgccgttaacatgcaggagacaagcatctcagtttgaagagtgaacctccccaatgcctctcagcactgtgtgctgctcagtcaggaggacccaggagatcctgaaattggctgattcttgactcccgtgaatttctcatgcaaagatcccttcttggtgtggggaggggtccacacccgctggcagtcactgaaggtccctgttcccaccctacctccagacttctagcaatctctgtgaataagaggcaacttcagaaccagagtccatgatgtaccatctcaccttctcctagagagtctccaaaattttttaattgtgcagaaaaaaaaattagcatgccgccccccaatatatcttacctgatttttaatttatatgcatgtaccgctatgttaatattcatgtatattataaaacctatacaaataggactataataggatacattaagaattttatttattaataattaaagtaatatttttattactttagagagcaatatgattgaatatgctggttttaaaaaagaattcttgatttaacacttcatgatccaactctaaaggttggattctaagtttagtttattttgatacttggttttaatgcctggcataactgaaaaatacacctcacaagataaacagatcccagcggaggaagcacgattcactgtgctggctaaatcatgatactaatttttcaaccccatcctccaattatgcaaaggattttgttgaaattcagcttgtaaatttccatcttccctgatgtcaatcagtttttcatgcaaactaatcaagtgttgcatttttatatttttaacaaatgggttcaaaatccactgaaatgttcatgttttttttcaaatgaatctttacagttctgtttccggattttaaaagtctgcagatatgagagcttttgtagatgacctagttacatcatttttagcaacaaaaacactaaacaatagaaatattttccaaacatttgttttcaaagcactttctctacggtaccagtttctgttgaaaatcaggttcttcctcattcacttggctgcaacttgtcccatctgatcaagatatgtttttgggggtgtgatgtggctggttaggtgtcttgcctaagggtatggaaagggttggctgaccatttacttttgtggcatgtgcttgtatcattagtattatctccaatccatgttttctttgcagttacctactttgtaagggttggttttcttaaagccagatcgcataatctatacctccatttactggttacctgtaaacagcacaaggtaccagctgtgctcaggtgagtaaatgaggagccccaccctcatggaaacatttcctcttttcctttagtggcttataaggacaagtgtcttgctgacataaggacatgtgaaggcactgggattattcagtcatatgataaatgttagtgaagctggaattatttccaggtgacaaaaattaggcattaggcattatacttttttccttctcccaatgtttctttttttttttttttttttgagacagggtctcactctgttgtccaggccgcagtggcatgatcttagcttactgcagccttgacctcctgagctcaagcttcccaagtagctgagaccacaggcacgtgccacgacgtcaggctaatttattttatttcattttttgtagagatgtggtttcactgtgttccccaggctggtctcaaacttctgagctagagcaatctgcctgccttggcctcccaaagtgctgggatcacagacatgagccaccaaacccaacctcccaaagtttcttaaccctaactgaatcacttgggagattttaaaacatacagatgctggggtgctacccctaactcaattctgaggatgggacctggacatcagcattttgaaatttttccctgagtggctctgatgtaagactcactactgagaagcagtgttctagactgatgcatcttacattttaatttgcataaaatcacctgttaaaatgcagattcaggttcagtgggtccagggtggggcctgagactgcatttccaaccagctccctggtggtgtggatgtgctgattggtagaacaccctaaataatgagctccagactgtgctgccccctgtccgcagtagcctcctcacctcattcctccctgtcactatcccaggcctttgctgaagagtcagggagcagtctccgctccctcctggcagagccgccacgccaatccagctgcctgggctgctggtcacagcttctcagagaaatctggcttccagatgttaagaacagttccttaacagctggaagaatataataaaataggccagaccccaccccctggtgaatttaagtatgtgtgtctcttgcaaaccactcatcagaggcacccgatggtcatctgcctgcccgcagactccaggcaggtttgctggcagtgtagccgggtggggtcatggagatgctggcaggaatgacccccctgtggggggcgcggagggagcagtgggcacccagccagggctctgtcagtgggactggtctgaaaccatacctcataataaaagtcatataatttgtggcagcgctgaaaacctgctccaagtagtggtttcttgatggagttttggaaccttatctgcggctggtaaccattccttgagaacttgttggagaaaggcgagtgagcatcttaagaaggctgctggggaagctgagtgcaccagggcggggggccagcatgcccgcaccctgcacagccaggtgcgacactcaaagattaatggatgatttgggtttttttttttttttaacctaaatggatgcaccttagggtctttttttgagttggggtctcgctctgtcacccaggctagaatgcattggcatgatcgcggctcactgcaaccttcgcctcccaggttaaagtgattctactcagcctcctgagtagctgggattacagtcatgcgccaccactcctggctcgtttttgtatttttagtagagacggggtttcaccatgttggccaggctggtcttgaactcctgacctcaagtgatccacctgtcttggcctcccaaagtgctaggattacaagcatgagccaccaccacgcccagccctcttagggtcttttaaaagtaacaaggtgacctaggaattcactgcatgacttgttttacctctccctgtcctgaatcttatcccatcatgatagttggtaaagcaccatgaacatctgccttacagacatgtcaagtggattttaacaagtgaggctatatacagagacaaaagtaagcatgtgtggagatagagattgggctaggggagaaataacaaggctagtttgactgataggaggggctagctatcttctcagaagtgcaggtgtttttaagcaatcctgactggtgaggtggatcatttgtctcacagaggaggataccaagggtcagagtggttgaataacctgctcagagtcatgcagccagttgtgctagagccaggatttaagcccagatctacccagctccaaagtctaagcccttttccacccacctcagtggggacattaagtagattgaaactccctcttagcttgtgtgttgctcgctgcatggatgaggctggaggatgaacgtgagagaaggtgacaaatttgaaacccactcttcagtggagtagctgggggtaccaacccaaaaacccacctccagagggaagaacttccagctgataccccatctcccctgagctcagaaagccctgagttgagaatccttgaaggccatgctcccgcagttggagctcgccaaagccgccccgggctctgtggtttccagagcagatgcggaggcggcacgtcctcgtgcccttgctccagctgcgcacacgacctcagcctcctctgccccgctgggcgcgagctgcagtcctggcaccttctgctggggtcctgatctgagccagttgtctagcgatttaatttggtgaatttaccactgcgtcccagagtttatattggcacttaacagcagtaatatgtttctctctcgccaagaactattttcccgaccaagatggaacaccacgcacaaaaaataggtttgtgaactaatctgctgccctgacaagtgtcattcacagaatcactgctatagagcgcactcggaattaaatgaggctggggttgtctggcctggatcacaggtgctttttcccactcagttaacaggagtctgggatgagacaccctttccctgcagccgcaggcactttcaaatcacactatcagtattcatgacagatttctctcttagaaaaatggtttgaggatggttagaggtctctctctctctctctcttttcccttctaacctccctttcttccctcctgggtggttctttttaggatgcccccaccctgtctgtccttataaaatgcagctctgtaaacatttgtctaatttcacaagctcagggaggtgcccccatcagttaaaaaaaaaaaaatctcctagtgcctgatgcctgtttgaaattctaaagtggaacttaattgctttcgcgtaaggatttgattcgggcaaactgcccatacctctgggagtagaagcaggatctgtcatttacactttagtctgaatgggtgcctgaacctgggagaaaacagctttgtctttccctggtctgccttggatgtcagaggcttcttaaagacagcgttattgaggggcatggtggctcatacctgtgatcccaccccttggggaggccaaaatgggaggatcacttgaggccaggagttcgagagcagcctggccaacgtggcaaaaccccatctccttaaaaaaaaaaaaaaaaagtttcccacttcatgtaagagagttcctcaaaattctctttcctgtggagagttctagattctcttttaccatatggtctccacttagcttgtcttgaattgggaagcatagggcagagtcaggcttgcgtcagcatcagaattaccagagacctgggtaaaaacgcagttcctgggcaacacccactgagaccatgttaggagctggcagagcccagggatctgcatttttgacaagcccttcccccatgagagattctgctgcaggaccatacccagaagcattggtctaggagcacacttggccctcagccccaccttgatatattgtctaggagcatccataaataaatggtcgccaggttatggtggccaattggaaaaactctttgtaactaaagcctgatgaaacacttgctggttcatggttggcgcctgacttttagaaggtttctcctcacatttcaaggtcaagggttggccagcgcatccctgagctgaaaaggaaagaagagcacctttccagttgagaaattggctcccctctggcaaatgccgccaacgtagcttaatattaatttagggaatgcagtcttgtgcagttccatggaactagattggaaatctgatagtgccatttctgttatctgattcctcacacacctgagatcactccccgccccccacccaactccccccagccccaaaggtggctgcagaggcgcaggtgtgagctggctcactaagtcgctttccccctcctgattaagcgtgtgggggaataaagaagacccgtgtcgactcacgccgatctctgccttgcctgtgcttgagccacttgtaattccccacagccccagccaggtctgcaaggcaggaagaaatatgaccaggcaagttgagaaaataaattaaactaagtgtcaacttttcttgtttctctcctcattattaagagatggaatggggctcgtttatcaagcagggggagaaattaattgacacggctttaatatcatgatgtctggcgtgtctggtcacattccttcattttctggaaaggcattttattatagtttacagcaaccagctgccaaactactggtgtaaacgaggaagcaggtgcatgaaggatgccacagtggaggggctgcgatgccaccctagaggggacggagacatggcagagaaggagggccagttcagaagggaccccaaagagaggctgcttattttggggggagggaggaagaaggatatcagggaggagggagggctgtgctaagagggcatgccagcagacccctcgcatccatcgcgggcttgtttactggcccaccaggagggcagtctcaagtatctgcctctgatggcctcctgacctggaagtctttgttcttaaccatccctgaggctgggtgctgtgtacagctcaggtcagcgtgcctgccccttttctttcttcttaataaggccagggaagtgagcacttctctgtccctccctccagggcagctgactcatttgagagccagtttgctgcaaagaaacttctagcatcaagtctggcatcccagtcctacttcaggtacatctgcggttgggggtctggaaaggttcggagaagtcactctgctgtgctcatcctggttagactggcttaggagatactctagctgtttttctgtgtgaaggtcttctttgctgtgtatctctgaaaatcctcagtgcctccttccctgctcttatatttaagaaatcacatacttcagggtgcaggggaagccaacatagagctggagtggatgaccatatctttccccactctctccttgccctctgtctgccggattgtaagaactgagggctcttgcctatttcatagatgttcttacagggaaacatgacagagacagggttcaggggtgcagttgttggacaaggtaggaattgatgagtatggaacagtctgccttcatatgaagaaggtgggctgcaggggagagaacacagggtcccactggggcctcagttcttcgtctgtgaagtgggaacaatcatttctattcatactccccagggtggggctgggggtgaagattgagttacagagtggctgctcagtgacggcagatgagctttctctttttaacattattattagaatgtggactgatcctcaataaccacctttgggaagcagatgcgagttgtaatggaaggaatcctagcccttcccaccttacaaagtccacattggcacccggatgtaaaagcacacacagcctgatcatcacccaccctttcccaatccctagtgtctgaaaacgcccaggaacctctaatggcgactccaattggctctcactgaagccaaagtattgtgcagtgatttcccaacatggcagccagtaatcagaaacatgctgctgcttttgaaaaggtagcttgttttttttcttggaacatactgatcttctgagttatatttttcttagagcaaagccaaggcatgtgatgccacctccccatgcctgccatgcatctgtgcacactactcatcgcttctgcacttccaggtggggcctcagaccttccaagtttagggttgcaggacagctgacttgccaaacctgccatagctcatggaggtgacctagaaacgttccgcgttggggctggggacagcccgaggtgtggggttgccaatggacgcacagccaactggggctcgacttgtgacgatgcaagcacaccaccatgcctccttgccaggccggtccctctcatgctctctgagccatatggccaccaaatccatccctgaacacttactgatccaaagaagaccctgacagtcttctccagaaaagtaggggggagtgtgaaagtaacttggggtaccactcctgggttcagttcctgcctctggtttagcggccatgtcacgatggatgagtcactgaactgtgcagagcacttgagcacaatgacagtagcagagcctgccctgcctctcgcagagttgccttggggaccaggtaggacgatggatgaaaaggattttcaaaccagaaagtgctccccacacccacacccaagggattcatttgtgctggaagcaacccatgaatattgctttccccaaatactaggttattagcaagagagggaagctgcatgagttataaatattcttaagtacacataccttaaatttctcatgggatacccagaataaatttgacaatctggggttttttcctccctcatttttttttctccattaaccaagtatgttaactcatgacttgcattgattttcactgaagatgcattagatactacatgattgcccattagtgttcattgacctatatgataagagaagaaaattatttttgaggctaggaggaggctgttcccatctttctctctctgacctaaaaaaaaattctcttgtaagttaactgtcgatgttcctcagtgactgcgtttggagcaggtcattttaattttgaggtatctcgttttcagatttcgatcttcttcttctgtgtatgtggtcttttgtagcttttattattcagatgaatatttagttttgttcatttggataaaagagggggaaaaggtttgactgttaaatgcttatctcttaaatagtgcttacttgttagtttctaataatagcttcattcaagagaatgccagaatttcatttttaaatgctccctgtcaactgctaccctattaatatccatttttaaaccactggtgtttagggttaaccttcccaccaccttctttgtccccgctttgctgactactggagccccttggaagtgtggggtgcagttaaggtgggggctttaggagaggcggggcaggtgccactttgctgatgccaggtgagaagggtttctttggtgaactagtctcttgttgcccaagttctggccctttgtttctcccacctcccctagttgtcagtccctgggtctcctctccatcctgggtggtggcttgagtgagtttaaatacccagggaggagttctctggttcttaggaccaagggagatgagcagtggatgttcacaggggtaacccagagggccccgatggagtgccagccctcacagactcgccatagactagaatcctcactctgtcagggcctggagcaggatccctgcttctgcctgcatctcttacaggtccagagaggcaaagggagtctctggggcacatagcttgttatctggccccttgctgagtgaggataattgtgtgtctcttttacctggctgctacacctcagtttgatgggccttcatgaggctccatttctgattctctgtggggccctcttctagggcaatgagaaggaaataatcatgactccctgtcctccatctctcccaaatctcttgtacatccagtagattgttcaaaagactatgatgccttaaaaacatatgtcaaataaaacaagccaggcacaacagtacaggacatagagtgtatgatgccacttatatgagaaaattcatagtcataacaagtaaaatataagccggtgtggtggctcatgcctgtaatcccaacactttgggaggctgaggcaggaggatcgcttgagcccaggagtttcgagaccagcctgggtaacatggtgaaaccccatctctacaaaaaaattacaaaaaattagccaggcatggtggcacacacctgtagtctcagctacctgacagcctgagataagaggattgcttaagcttgggagatcaagactgcaatgagccaagattgttctactttactctagcctgagtgacaagggactgaaaccctgtctcaaaaaaaaaaaaaaaaaggaaaatagaggttactagggctgggggagggggaaatggggagttatttaacgggtacagaaaaggtcaggaggtggatactggtgatggctgcacagcattttaagtgtacttaatgccactgaattgtgtgattaaaaatggctacaatggccgagcacattggctcaatcccagcactttgggaggctgaggcaggcggatcacctgaggtcaggagctcgagaccagcctggccaacatggtgaaaccctgtctctactaaaaatacaaaattagccgggtgcggtggcgtgtacctgtagtcccagctacttgggaggctgaggcaggagaatcgcatgagcctgggaagtggaggttgcagtgagccgagatcgcgccactgcactccaacctgggtgacagagcgagactctgtctccaaaaaaaaaaaaaaggctaagatggttaattttatgttacgtatattttaccaaaataaaatacttatttcagaaaagaagactgtgatgccaaaaggatttttcccacccatcactctatcccaaatttctgaccccattgtttttgtcctcctctgctcattttaattcattttgggggttattcagcactaagttactaattcattgtaaatgctaatgcatctgtgaagtaaaaatgattatatgttaaggaataacacttattgataattaagtgttctgttgcttctttgctttccccaaatggaataaataaatattttagacataatcaagtttgttttctctgctcgggccaaacagacagagatgttgaaatgatataggtctttaaaacactgcaaatgagtcttgacattgctgaattgttatgcatccagggtacataggcttgaaatccgggctatctcctttaatcaggaaaatcatttttgtgatacttgaattttgagtcctgtggggttaggaaaaggaccagcggggagaatatcagagtcagaatttgagatgatgccctgagtcttgccccgacccttcctggtgcaacagtctgcattttaattcctgtctcctacctcagttgcctttcttcccatctcagagtgggaaactggggcatcagagagtcctgaattaccattcagggtatggaggtgatttgtgcagtggaccaggaaggagttggtttgcagcaggaaagcagcttccatggccgggaactcagccatggcctgccatggtgacttgactttactctggcctgtattctaggatcaagtgtggatctttgcttagctgcaaggtggctttaaactaggctgtcctctggctcatggggcagtgcccttcagtggtggcactgacttcatgttctttccccatagccaggatgggtttttctcattcatccactctctcctgccttcagtccagagcagcatgattggccaagtcagcaggcctggcgggaggaggttgcgtgcagcccccctgtgtgggatatggaggcagctgaaacctagaaccttgctgtattagttttctgtggctgccgtaacaaattaccacaaacttcgtggcttaaaacaacagaaacttcttgtctcacagttctggaagccagcgctgcactcccccaagaggttctgggggacagtcgttccttgccttctggaaaaccagcttcttaagactccaggtgttcctggtttgtggcagtaccactccattctctgcctacctctgtcttcacatggccttcttctctttctctgtgtctcaaatatcccctgtttgtcttttaaggacacctgtcgttggatttagggcccaccctaaatccaggataatctcttctcaagattcttaattaaattacatttgcaaaagctctttttccaaataaggtcacattcataaattccagggattaggacatggatgtatgtttggagggccactattcaacctgctacacttgtcctaattagcagtgaggttccctaaaaactggcctatcctggcttgttttatttgcaaggtgcctgggcgtgggggctggggcagaggggtgaccttcaaagacagatgagacccagagtgccccacaggctggaagtgaggggtgagagggagacgctgtccctgcatgggatcctctgactcgtgcctgttcgtgaattgtgcaagcagagggccattgccttgttgatctccacgtccttcacagtgcctagcacaggtggcagctggtaaacgcagaaggaagagcggaatcagtcttgaggcaaagcagtgactcaagtggattagcaagatgctcagaccctggaggagcagaaatggctcattcagtcactcacttagcacttggtgtgtgttaggggccctgttccgtcctgaggacccttagaggacaagaccccagcatcaccctcttgcagggcgctctggcttgaaggcacgctggccaatttccgcggcctccgcagtgccacccctccctccctgtgggattgcgggagggtgctggctcttaatccattctactggggccagttaggatctgggccctaggagggtggggctgggggaaggggattaaccaaaaagattaagttcctggctgagtgctccaggggtccttgactgggtgggagttttaacctgatgtttttaaggctcctcccaacccaggattcctgagacataccccagtagggtgagctgaatgccctcaggaaactgaaagtgcttaaaggagcgcttgaggaacaaataccccaaagcccaaagagaagtggcttggggaagtgtcggtgtggctcttctccagctctgcaatgatcagtgggaccaagggccaaggagaaggagatgcccaaagagagggaataggatagcgttcccagcagctttctctcaaaggacctggtttagggggtagggggtataaacctggtgaaaggtttttttgttggacagcatttcaaaccacgtatcctgtcggatgtctgcttcaggcctctgaggtaactgagaacctagcttttactgggtgacactgggagaaactcggcatctttgagcccctccagcagacactcatgtccactttatggtacatctgatgctgccttatgtatctacaacaggctggactgtgtatgctgggagcactggcccagtatttggcgggtggtggtagcaaatgacatgataaagatcacgattgctgtgtttcgtggtcctagccctctgttttactggaaatggtttgagagcagatagtagccttttttattctcataccgaagaatctgctagtccctgcaggagctatgctaaaggagctccacatatcagctccctgtttcctggtgttccttggaagatggtgatgttagagttggatgcatgagagtcagaagggacctgagaaattccctctccgtcttgtgttgcagggacccaaaatagacacagagtttgaaaaggaagcatctgtattttgctcattgactggaaacacaattatcataatataattgtgatagaacagccattcagtttttgtcttcctgcttggtgtgtctggccattcagtttttgtcttcctgcttggtgtgtctggcttagtgttcagccaggttcatacctttggggagaagagtgtcttagctggggcggctataatgaagtaccatggtctaagaaaaacggtttatttctcacagttctggaagctggcagttaagagcagggtgccagcatggtcatttctgggagggccccccttcctgtgtacagacagctgccttcctgttgcatcctcgcatggtagagagaaaaaacaagctttctaatgtctttctgtaagggcactaattccatttatgagggccccatcctcacgaactcatcacctcccagaggcctgaactcttaataccatcacattgggagtttggatttcaacatgaatctgggtggggggtcggggggcagcaaggggcagccacaaacattcagatggcagcagacagccttgtgaatcctgatttgggctgtgacaggaggtgtgaaacccagggtccagttctaccaccttcatttgcagatgcaaaagttgaggctcagagagggcaaggggctcccccagattaaacataaagtagatgcacagtgagaagtggaagccaggtctcagtctccccatcagtgtgtctgcccccatggcctgtgctccctcgccatgttaacgctaccatgtggcagctgcatcccatccaaggagggtgcaaccctgcatggggccatgtggtaaagcagcacttactgagtggggtcacagatggggccacatgctggaaacgctgtcggaggcgggaggagaagaaagaaaggggcaggagggtaggagaggaactgaggatactgagcagcagtcgcctgccaaaattcttcagtgcagcttgtctagcaaagccggtctccagcagagtacatacagtggatagctgacgggctgacagcaggcatcaaacagtcttaaactgccccaaatccagagcgcttttgaagcagcagtataaaaaggatgcctgcgcggaacagaggcctgaaacttttaatagtttcttccaggcctcaggatgtcctgatgaggtattagaggaagtaattcaggaagaaaaggacaaataaccacctccgtctggaggccgacccgagggctggccagggctgctcgcggaaagggcaagcgtggccccgcagtgatccacgaggctctggttagcccacccgcctgctgccgtgcacagagccgcggggctctgacccttgtaaataacagacaagtaaatttcttgtttgcttcggggcaaatgtaaaccacacagtgcccgctgcatgtgggtgaaatcattaacttttcctcgctgtcggaagggtgctcagtacaaattagaaatcattgcctccaacctcaaggtcctcccaaggatccgcctacctacccccagaccaggaggctgtcaagacctcaggacgtcagagaaaaacctgggcctgccagaactgaactcaccccgcctctctttgttttttcttctctctcttttcctttagggtttggctttgtcacttttgagaatgaagatgttgtggagaaagtctgtgagattcatttccatgaaatcaataataaaatggtaagtgtgtaggggttgcgctgaaatggaatgccccctttctctacgtacacacccagtcttgcagactggtccagcccatcatcaggctggagtgggcaggggtggggagggggctagatgctcggggtccaggcctgtgaacagtagcagttgtttcatactgaggtggacaaactctgtaaagggccaagtcgtgaatattttcatctttgcaggccataaagctgactgcagctacccagttctgctgggtagcgtccataggcaatgcatacataaagcagtggggctgtgtttcaataaagctttgtttatggacaccaaaatttgaaccttatgtaattttcacagatcacaaaatattaattttttaaccacttaaaatgtaaaaaccaggccaagcatgatggctcacgcctataacctctgcactttagaaggccaaggcaggaaaatcacttgaggccaggagttcgagacgagcctgggaaacatagccagacctcatctcttaaaaaaaaaaaaaaaaaaaaaaaattagctgggtgcagtgcacctgtaccccacctactcgaggtgagaggatcacctgaccccaggaggttgaggctgcagtgagccatgatcacaccactgtactccagcctgggcaacaaagtgaaaccctgtctcaaaaaaaataaaaataaaataaaatgtaaaagccgttctcaattcttggactttacataaacaggcagaagggcgggatttgacctatgagtcgtaacttgctggcacctggcttaggatattcttttgctgtgcagcttttgagaggtatatcctagataggaagtttactgcaccaaactatttttctctttgggtcctgctggaaaattaacattccctcccttgccatcaattaatttctgccctcttgatcagctgcttccttccctctctttggctctttaaagttcctttttctgccacagcagcctcaagaggaagggaggttggattactggaagtttgggaagtcgtgtaggcctcccagatcagtggccaccagagggtgccatatcatgcatagcatttgcacactcacaaactcctttcttcggattgagtaggagggtgagaattcccttctttgttggttccagaaaaatagaagctcagcaggtgtttctggaaccagtcctttggagcaaaaacattttggttggccacgagagcctccagcctcaagagaagagggagggcaaatctgtgtttcaattgcagctgtaactttaatattttcttccttttgtcaaaacatttcttgcttctaaaacatgcgttcagacatgcattgtatattggtctgatatgtgttcaccaactttaaattcaataatagagcttttagtgtggataagatcaaagcaatctgcttagcatgtggcgctacaggcctgattcaatatttgacttgctaattttttcccagggcactaaaataatattgttcgtattgttccttgccatcatatgcatctgaaatgaaaatactctttttttgcgtactgtatgttggaggcatcaactcagacattaaaatggtaggagggagataagtgtgacagaataacacaggtcccctcataggctttctcagctccccagatgtccgtgcaagtttacagttggtacttttctcttggtaggttactacttgctattttttttttttaattgagacagagtcttgctttgttgccctggctggaatgcagtggcacgatctcggctcactgcaacctccgcctcccgggctcaagcaattctcctgcctcagcctcccaagtagctgggactacaggcatgtgccagcacacccagctaatttttgtatttttagtagagacggggtttcaccatgttggccaggctgatctcaaactcctgacgtcaagtgatccacctgcctcggcctcccaaagtgctgggattacaggcatgagccactgtgcccgaccagtactagctatttttaaaaagagagagagaggacttaaatgaaacttgcatccactgcccagatgccttgtttatcctagccagagcacgccattgacaggctccactaaggctgctgggcagtggggaatagaagagagtactggcagatgccattcctgtcttgccaagccttaagggttcatcaggaaaggccagatgtagaccggaaggacattgctccatttgtcaccttgaatgcatatgtgtagcccttccctgttgacaggctttgaaacaaacccgagacacagatggggaaaggctttatcctgggaaactgaggctcaggggataggtcccaggctatccagagagcgaaggagcataggtcttgagcttactggtgccaaaggaactatatagacagttgttggagcttgggggtgggagggtgaatccccagataacccgggcagcaatcaggaagtagagcttctgccccagaagaagaacccatggggctggcttgaagccagagagatttgcagccattttcctgtttcatatttatcgccttctctcccacccaggtggagggtgactatgtcaggtgcacgtaaccgggtttttagtgtaagggtttgtgtttgcctttgaatctggggctagtacttgttcttcaagagaatgagcaaagatggaagtagacaagaggaagaagtgggggcagattgattcggatgacaggctttggaggtgttggtccacgttcccagcacagcccaacagttatgagctccaaggtggggagtttagaggccctgggagaggactttggagaagaacactgggccttgctgagctccagtaagacagggctggtaatgatactgcctcattgggttgttagagactgggtgacataccaggagcaaagggcttacttagcacagtgtctgcacagggtgcaagcttgatctgtgttatctcttgccattatccttgccatcatccacgagttgtcattgagagagatttctccagccaattcccctcctctgaagaagggtggaatttaaagggtgttggtagagaagcctgcatcctgaattgttttggtttttgtgatactggtttctacttctgaggcccaaagaaaaggaaatgagtttaaactgggctatggacagaattcaaatgagatatctggaaaaactgaaaactcagagactgccaaacaagaacatggatgattgttagaatgtgcataggagtgtttcataaacaggactgtgctgtgaaaccacagacccatctcctcaaaccctcgcaatctttctgggtatttggcaggaagtggcagatagctgcaccccctggtacatactggagccatgatttttttatattcacagatgggaaaggtcttactgcagattagtcacagacatagtacttgaatctaggtcttctggttcaatctcatgtgcctggcacttaggagaccctgtataaataattgtggactaaataaaggattcactgaaggaccacatgtctgtgaggcacattataattcctaaagccattgcccatctaattgggtcggggagtctcttcctgggcattttttaaaatggagttccttctctaccatgcagaagggccaggagaaggcgtgagtcattctactcacaggggaccaggatagctgtctttgggaagtggggatcacaggaatccttccttcattctccatgtaggccctgccttaaggaggttatctccaggcaggaggatgcccagaaagaccccacatgacaccctttcacacataaagatcccactaatagctgacattgggtggtacaaactacatactctactaaacactttatgcatcatgcatcttatttcatttgattttcacttactctttaatcattatccccacttacagattggcaaggcaaggcagagagaggttaagcagtttgcccaaggtcacatggtcagcaaatggcagccccagaattcgagcccagaaagctatactccagagctcacatctgtacccatcagactgtgtgtccccttcaggccaaaaggggctttcagggttatgtagctgggctgcaggccctccatcactgaccaccctttcccagtcagctatgtcgtggcccatgtggttccatgttctcctaggagaagagcagaggagacaggccagattcccagctagggagaaggaccacgcttgggtttaacaggtcccagatctccatgcctcttcctccactgccacagacacagataagtgacgagcatgggtcaggagctgactgccacccaagctcagggccaaacccacaagctctccaagccagagcaaaatgcaaatgtggctctttatcaataaacacacacaaatgcatgcacagagctgcctcgtgacccaccagagaggggatcctccctggccactctgtgtgccccagtgcgggtgcagctaataatgcctcccgtggcgtccccctgattgaagcagcccctgagcagcagggacacttgcttgatgagtcaccacagcccagccttcaagcggcctcctgacgagccgggcagcagcaggaagggaggtgagaattgacaagagccacctccaggcatccgcagaggcctagtacagcctagagcttgaaatgatgttggggagccatcaccaccctcattgggtgagagcgtgggtacagcctgaaaggtgcctgggacgagggcatctcgggtagagcctttcctcacgcctgattcaccagaaaggaatcggtgcttataggcactgggactgtgctttacgtgcgtgctgtctccttttgtcctcacaacatcctgagcaggagtcctcatctcattttacagaggggttcactagagctcagcagcagtggatcttccttggtgggacagttctaagggatagagctgggatttgaacctgtgtcattctggttccgaaccctctgttcttctcattataccttgctgcccatttaggcaaacctagtatttgaaaaatatggatttatatgatgagtgaatatcaagaagagtttttatttgcttcatacaatactactgcaggattactttaaatcaactttgtccaacccatgacccacgggccatatgcggcccaggatggctttgaatgtagcccaatgcaaattcataaactttcttagaacattatgagattttttttttaatttttttttttaaagctcatcagctatctttagtgttagtgtattttatgtgcggctgaagacagttcttccggtgtggcccaaggaagccaaaagattggacacccctgctttctgttttttgttttttgtttgttttgttttgttttgtttttggagacagggtctcattctgtcacccaggctggagtgcagtggcacgatctcggcttaccacaacctctgcctcccaggtctgagtgattctcgtgcctcggcctcccgagtagctgggattataggcatgcgccaccacgcccagctaattttttgtgtgtttttagtagagagagtgtttcaccatgttggccaggtggtctagaactcctggtctcaagtgatccccttgcctctgcctccaaaagtgctgggattacaggcatcagccactacacctggctacacccctgctttaaatagtcctttttcttactcctttaaggtgataggatttacagaaatttgctaagtaactcatgggtacagctactttggttgtcccttgtcttggaatgagaggtctggatgctggtaatcaaagtgtggtccatgtaccagcagccttggcagcccctaggagctggttaggaatgcagagtcccaggacccaccctagacctacagagtcagaatctgcatgctgacaaatccccagtgattggcgtgcacattaaagtctgagaagcaccaggcaagggccactgctaatgacagataatgtgggacttgtgggtcataaattgcccagccatcatcatcagaaggaagggacttgggaatgaagggagcacggagccaggccaaatggggccaaaccaggcctggcacctggacctccaggccagtctggtgctcttggcaccactccatactccctctatggtcaaacagagaccagatttccgaagatctcccagaggaagctctcagtgccagagactgctcccgcccctcaccatgccctacccctctgggtgcaggccttggagcattgcttgcagaagacacgtgaggcatgcatctcttggggtaaagggctcgattctcctgagtgaggtgcacgtgtccttgtccccaagtcgggacctgctgggtcacttagaggcaccaagagagccttggaacctgagcctgaatcccaggtccaccgctggtgattctgtaaccacaggcgagtgccctacctgtctgcaccagtttgctcctgtgggaaatcagaaggttgaggatggctgccttttgcagcttatataaagctctgctttgatacctggaggtctcggcctgttctgttgtagggtatgtaattgggtagccttgaaggaatcagcccttgataacttcacgtttcccccactgggcctaagccaggggccagcaaattttctgtaacgggccagagagtctctgtcacatctactcagccctgccattgtagcacaaacacagtccaggcaatatataaatgaaggggcgtggctgtgttcaaataaagcttatttgcaaaaactcatggcagctgggtttggcctgctggccacagtttgttgactcctggactaaactaatctagctcagagcaggcccagtcagggtgctccttgtctacaggggtccaatgaaaggcatttagccaaatggtcagccagtttcactattgagcacacattattaggggcagagtagaaagggggtgccccaaacaggcacacgagtttggggatagcagcctgtggaaagtatcagtgccttcattctttgggggagcccccaggtggggagtgacacaatggtcagaacagggtgctgtcaaccagggcggccttcctggtagagggtgcctcaagtcctcagtgctgaacccccttccacttcccagctttgtggccttgggcaagttacttctgtgtttcggctctgtggttcccctttctataaaacaggttgtggtagtgcctacctcggagagtgctgtgacttaagacttgtaaggggtttggaacagagccaggccatggcacgctctctatcagagtgatagattttttcaccactgtcgtcattgtcatcattcttagaattattttactgagcaaataaagagttagcaggtaaggaggtcctcagcagattataagtcagtaaaatgcaagtggtgcgggacctgggcaggactgggtcccgagcctgcggggcagggatggagagtatgaggtgggcactctcagtgcctctggggatggtcctaggaaaggaggtggtgcacctcccaaagcaggaggaaccaagagatgtgattgtctaggtcctggaaaagctgagtcccactcttcacctgactcattctttaagaaggttccagaaaaatccacttctaagagcaaagcctactgagatcttaggcctgctacccttcagcccagggcatacctgggggattgactcggaacaggggattctggggaaggaagggcagaaggataagaagggaggagggtcctgagctgtcctcttggactcagggctgcggtgctgtgaccagcccatccatggaggccagccgcaggctagggtcggcttctgggccctgccacctggcaaggtgcccagtgattggctcacccccccactccttccagctgctcctcctcagccctgaagacaactcagtcgggaaccagcccaaaagtggtgggtgtatttgtgtgtggggaggggggcgggtaatgtgggtggaattaactaggcttctgtattcacaatcctatttgtagcatcattctcactcgtaagctaattttagccatccattctgcttctgttgccatttataaaatgagaatgtcaaatgcaatattaaacaagcaggatgaaggcaaaaaaggaaatgccagagaggcatttaataaatgaatctggtgtttacgtgggagagggagagatcctgccccccacgcatcacacacgcaagcgcgtgcacatgctgtttgtgtacaggctgtgttaatgagagcagagtgattagtgtgttgggggaggccgggtggttcggtggtaaatgtttgttgctctttaggcagaagtaatttggcctgcagggagtggcctcccagttgcctgagtggttcgcttgcccttcatctgtcctctggcgatgtcagtgtaggcagggccagggagggcagtggtctgtctcctcagtatctcagcacccagtgcctctgggcttttctgaacgtgctgccaccagcgtccccgtactccacccccagggcgcagggtcatgagaggggagcatggagaccactaggaggggctgcccccccttctcttctgcctcttccccgcgcagaaggcagggcatgaacagtctgcgcccgtatgcagctgcagagaccaagcccagagtagcgtggctcttgcctggactcttgccaatttctcttctagtttcactctagtttccccagggcctgggagttctgtccctggttcttcctttgccctcttctttcagctgcctctgcctagaaaagaaggctcaagccataccttttattttctccctcttttaaataaatgaagttaggccccacgcagggcctctggcccagcccaccgtgccctggggtaagcactcctccagccttgtggcggaacctgagcacctgctggaggctgaggtttctttccactttgaaatgcccttgcaggttcccagaaatgaaaaggaggacagctgctgctgccaccatcagctttttccccaaatagtgcggcctgggaagctctctttgcacatcctgctgatgaaagcagggagatgggacctacctggccgacaggtgcagggagggttagggagaaaggcaatgactgtgtgctaagaatctgctgtgctggggaggctgctgctctctctcttcctcttcactccccattctgggatttcagtgaacacagatgtgacctgacttcatcaccttcaaaggcactcacctaggctccatgtggagagggcaaggtgtgactcaaccaactttatccagtgcaagcactttgtaggattagctccgagagccctatggggtaggcacagctgtcactgttttagagatgagaaaattgaggtgcaaagaagttagtcagctggtctcagctcagagagccggcaagtggaacagagatttaaagccaggagccttagccctaggctagactgccgtataacagactaggaggcacccactctcagatctgggcagggtgggggctgcagttattggggtacatctcaggtgatattggggaccagctcctctctacccattgcccagattctgaggacctctgagggaagagccacatctcagccacattcatttctgtgtccacacccagccgctgcttggtaaatagtagatgcttaatgtttatttttggtttatgacctattttactttgccatcactgattgtaataaaacactgagcagaggaaacaatggatgaaattaattctggaagtggtaaggagatcagttgtggaagctagcatcgggaaaggctttgtgaactagacgcagataggccttgagggttgggtggagagtgtggggaagggctgtgtgaggtggggtgatgggggggggtggctggcagccagagacccagaggagggagcaggggttttgaagctgggggtctatgattggattctgactgtgctttgtgaccttgggcaagtcattccttagaacttctgtgtccttttctgctgtaactacgaggcgggtaaggccatcgcacagaggaaatgaggctccatgcaatgagggagttgacaaccatggacattctttgaggacttctgtgtgccaggcactgtgctttatatccattatgtgtatatgttatgtaatatatgaaaattacaaggatgttgtggctgtgcctagttatggatagcactcaataaacagtgcgtgccttcctccccagagtaaccctcctgagtcaagattataaatctaacaggtctctcaatgccttttgcaaacaggtctgggccatttataacatgcatgtgtcctggaaggtagacattcctgctgcctgcctttccctatggaagctggcagctccatttctgtttgcacagtaaccccttcctctgtagactgcatgggcaggtcccacatccatgaggacctttttgcagtagaacaaggaaagttatcatttacaagtaggtcccctggtgcttggccacacgctggtccctgtccacaaggacagtgcctgattatgatgtctgagaagggaggagggagggtctcttccgctcactttccagtatccacagtgaccagctgggaagcctgtctgtgttaggccgttctcgcgttgctataaagaaatacctgagactgggtaatttatttaaaaaagaagtttagttggcttacagttcagcgggttgtacaggcatggtgccaacatcgctaggcttctggggtggggcctcagggagcttttactcacggaggaaggcaaagtaggaacaggcacgtcgcttggtgaaagcaggtgcaagcaagcgagagagtgcagggaggtgccacacatttttaagcaactccgagtaagagctcactcatcaccaagcaggtggcccaaaccattcacaagggatccacccccatgaatcagaggcttcccaccaggccccacctccaacactggggagtacatttcaacatgagatttgggcggagacaaatatccaaactatatgactacctgagtttgcaaaggagcagaagggcttgtaccagtgagggaaaaggactgcagagtggttagggacccttcccctgccagattgaaggaccagggcttcccagcacagctgccaggatttacaggggtgcaattgctgcctcaccaaccccctagccccttactggcttcttaaggccttgccctcacctggccacatactcacgctagtcaggaatccatcttggcctctggccctgggcaagaagagcaacaggatggaattgaaaccctggagcagatgttagaactgagtagaggtgacctggctctctgaagctcacgcaggagtgatggtgacatgcccatctcaagtgggagctgcacatggagggcagccgaggttcctgcgtttccctccccgggccacttcacctcccctaggtgggttccaccccctctccttgttacatcatagcctctttctccaacacattcaacagctctctctcagcagtgccagcttcctgggtgtaaggcctgagccgtcgcttggccctgtcctcagaggccccccacgctggtctaatgctctgctctttgttgccgtcttgcaaatcctagtcattgttggtcaaaggaccccttgtcgtctttttgtcatgggccctgttcgttctgctgtgaggctgactcagggccaggtgccgtgcaggtacacagtaggagttgaactctgatcaagggcttgttttgtgtttatcttccttgctttgcaagttccttgagggtgggtctccccgaatcttgattataaacctgcaagagccttacaaaatgtcctgctttttgtggggtctccagaaaggcttgtgattggcagagggggcaggagagcagtgaccaggaagaaaaaaggctgtggccactggatggcaaaggagggctgtgcagggaggtatgtgtgacatgtggtctctggaggccaagctcacccctcctgcctcagtagcaagatgtgtgtagctgtcaggctctaggcaagacactttacacttgagtagcatctcccctcctcttcaccatctccctgggcagggctcagggcctaatgtccggaggtgaggatcttcagagaaacaatgttggcctcaaacccaccagaacctggctggggaagaggtcaagctgatcaggcgcaagaccaggtcaggcctcttatgtctgttaggaaacgccacagaaggacagatacccaccctagaagctgcaggacctcctctcctcctgagccctttcctccctctgctcccctcccctttctgttagccagacagtcagacggtcaaggttgatacctgagcactggggaattttatccatcgaaataggcctctccctctggaggactaaacagtctcagacacgacctgtttggagtgagaaatgaaactgcaaacactggcctcttcaggccaaacaggctttccttgtcctggatggtacatcaaggccacaggtccagggcttggatttccctctgggccccaaggccgcgtgctgactgggttcttttgtacagagaccagggaaaaacaaaagccctttacttcccaaagcttggcatactcctcagactgccagccaccatccccaaagatgccagggcagtgagcttacctttgcaagggcttcggatccactggggaggagtggccactcatagtagctgcagggaagctgttcttgcagaagctccagcacctcctctgaaagccagtgctaagcattccccgctagggagagggtgtaacgcagggccacagcacccactctcctggcttgggctggggctataggcagatcgggattaacatcccagccctgcacacaggtactgggtctggaccacaggttagatgtctgagtctgagcctcagtttcctgctccgtgggatggatatatagctataaaggtcattatcgggtccgctggcaaaacaagcgtatggaaggtaaagtattgcattaatgttaaacgtactgagactgataactgtgctatgattacgtaagaaaatgccctcatgtttatgaaacgcataccaacttactctcaaatggaaaaaaaaatcctggccaggtgcagtggctcacgtctgtaatcccagcacttcgggaggctgaggcgggaagatcacgaggtcaggagttcgagaccagcctggccaatgtggtgaaacccctgtctctactaaaaatacaaaaattagcagggcgtggtggcgtgcacctatagtcccagctactcgggagactgaggcaggagaatcacttgaacccgggaggcggaggttgcagtgagctgaggtcacgccactgcactccagcctgagcgacacagcaagactccgtctaaaaaaaaaaaaaattctacatatagagggctcaggagtgtgtgcaaatgataaggcaaaagtaacaaaatgttagcagtaggtgaattctggtaaaggatactctccttgcaacttttctgtaaatttgaaatgattcctgagtaaggagttagaaactgcaaacctccttgctgagttgctgtggatgctgatgggaggaggcacccaacccagtgggcagcaaggacaagagtgttagcgaccacaggggccacactcccatcaggccttcgttttgttctctaaaggaacatgctgctgccctaggtgtccaggggctaggtgtccaggggctaggtcattattctgaacccattaccatggggactatgaggaagccacaccctctcttctaaggccagtttgtcgaacaaagcagcatattgggagaagaaaatttcagaacaaatcccatcaattttgttggggtggggggtgttggcacatccctggtattgggagtgttttgtggcattgccagctgtgcaccttgaaaacagagacctggtccttctggtataagcagttggtcatcagtggcctctgaggcttcttacaagtgctcagtcagatggaacatctcactgcatttcttgccccttgaatagactgctctggtcagttgctatttgaaacagtagcagcagtagcagcagccactgtgagaagccgttggtgcaggagactcaaggactgagactgggaggtgggccttcctcaaggggaagtcttaggaggtggggccaaaatacctgcagcaagaggcctggtccccatgagcaccacatttgttttgttttagaggaccatggggagccaggcaggcctgtgtggggctacagtgggaagggagcccccgtgccctgccctctgccctgtggtgagagcagccctaggtgcccactgctccaaggacccagccagccaaaagccagagtgtgaggagtgcctcctgctgccctgtcagctcactgcccttcaccgaccacatgtggttgttggtctccaaagattatccctagagccccctcccacacggactctaggctggcccagtgtcaccagtagaatgtgtgggagggaacactgtgagtcccaaggctaggttagaagaagccttgcagcttctgcctgagtctgttggaatgcttgtgcttgggacacttcctcttgggacttagccaccatattgtgacaagaccaggcgccatggagaagccatggtggacgccccatcagcaggcccagccaaaccagtgtggctgcctgccatgtgagcgaggagccatcttgggcctccagcctcgttgaggcctcctctggcctcagccccagtcaccacctgaccacagcgccatgagaccaccagcaagagcccagctgagccggtcaccccacagaaccctgaggaaggatgattaaattgttgctcaaagccactaagtttgggggcagtttgttgctcagcagtagatacctggaacagagcatgtgaccagatagcctaagtacatgactagaaccgaaaagatagaccactttttaccctttttgggttctgactgtcacccgggttgttcatgccaagctctctggcttatgcagggcctgggggaggacagcaggggaaggtgacccgatgtgggctaactcaagacgctcgagaggctaacaagtgcagaagcagcgaggggcaggttgatgtgtgagtacttgcattcatcttaggagaacaagacagtcagagcctcttctttttcaatacaatgagagctctcagagaggtggaggctttccttatttatctttgggtccccaaagcctagcacttgcctggcgtgttgagttcctccgcatctgcgtcattgaattaagtggctgagtctcgggggtggaggggactggacaggcttcctggtcctgagaagtctttcaagaggccttcagggcaggcaggccaggttccctgctgttaactgttacctgctgccttcccctgtcattcagatgcccaggacaggccagggtcccctggagagtgtatgcgccatggcccctggccttggggaacactcaccgttgacccagcaggtggttggcactcagacagtcattgctgcccaaaccaccagcagcaaagacagagcagaattaaacagagctgtcagccctgttcagtgagaggaagagtaggtgggtttgtttaaaacactcccattacagtcagttaacctttatgttccctaaatgaaaattgtataaacctgagatttccgttgatcgggttgcctaggaacaggcagcaggttttcataagacaatgcagtagattgtcaccgatagggctattaggaagtgagctggttagcggtattattccccttgctggtgttggctttgggtaattatctgtctgcctgtgcgagacacgcccatcttcctaggcttggggcaggttcatgcaaatgagatttctcagcctgctcctctggagtcctgaagccagttttcacccctgggcttaggagagaaacctaaaagagccaatttggatgagtttgttgttttcaatcacctttcccccctacctgcaatgacaatattctaatagccctatcagtgacagtctattgcattatcttacaaaaacctgctccctgttgcttagcagaaagcttagaaaataactagcaaaatgcccaattaaaatttaaaaacagagtgattctaagacaactttagtatgtcttttcagtatttttccctatatgatatatgcacttgtttatttttcaaaaagtcagtgacatttgctgttttcccgcttgcagttaaagaaacccatcatcctggtttgcctgggactgaggggtttcccagtaccagtgcatgattattatcaacacactttttcatagctgcatagcattcaatcagtgtggataatccaaactcagctaattccctgttcttctatattttaggtatttccttttattaaaaaaaaaaattctaattccggtagggcaaattcctagaggtaagattactaggtgtatgtataaatttatggcttttgatgtagtgtctggttgccctccagaaaaatacgtgccaatttccacccctccacactataccgtcagaaacccttacatcaaacaatgctttcatcactgtcaatctgtgggcaaaaaatatgcttcatcttggggaatgtgttctttattagccgtctgtgaattgtctactcctgtcttttacccatgtctgttttgggatgctcatctcttttaatctatagaactctgtattaagcatattagtcatgaatgttgaaccattttgtccactttttaaggcatttgtggttattcttgaaagagcaagagtaatacctgttgtccggtgtctttgaagaaaggtgacttatatcttaggtaattatagcatccccctaaccttgagcactaaaatattttttgattgaagtatttgggatgtgagtatctccaaaatggataacccatagaggttccttttttattttcgttttatttattttttttattttttgagatagagtctcgctctgtcgcccaggctggagtacagtggtgcgatctcggctcactacaccctccacctcccgggttcaagcgattcttctgccttagcctcccaagtagctgggattacaggagcatgccaccacacctggctaatttttttgtatttttagtagagacagggttttgccacgatagccaggctggtctcgaactcctggactcaagcagtctgcctgccttagcctcccaaagtgttgggattacaggtgtgagccaccacgtccggcctagaggtctctgtttaaacaatgtatattgcacacagtttaactttttcttgctatctcaggcacacctgtgaacaatagcaattttctgtgttacagtgatacctcagcagctgttgaactatgtagagcttttgttcctataccatatggcccagactgctctttaaataagatacctgtttcttgtcttttctccgtcatttaaataagatacctgtttcttgtcttttctccgtcactatcaggcggccatgctgtttcttttggctgttaaaagcatccgtgccttaccctgcaacatcccatcttcatcagcagtgggattgatgactggctaacaatgcttgttaaatttctctgtaaacaaaaagcaaataagtgctaataagcacaggcctaaggcgctctggtaaaacagtgaaggagcttccgagggccacagttttacttattccctgaggtttatagttcgcatagttaaggttattaaataagtgacctctgggtatacaagcagattagcatgaagaaatttgagagtcagaagggaaacagaaaggggagattagcaaccacttgaaaatgtagctgcaaatgagaaactagtaatccagatgaacagaatcagtgtttaatcttattacttccctcaggagtgtggtggtggtgtaggttttgtggaaatgtggcattgctgacctagaaattctaaagatctggtttgtaggcctgaacctgttggggagggctttcagcatgttgcacaagaatttttttttttttttttttttaagacagggtctcgctgtgtcacccaggctggagtgcagtggcgtgatcatggctcactgcagccttgacctcccagactcaggtgatccccctacctcagcctcccaggtagctgggactacaggtgtgtgccaccacacctgcctagttttttgtatttttttagtacagacggggtttcaccatgttgccaggctgatctgaaacgcctgggctcaagctgattcacctgcctccacctcccacagtgctgggattacaaacatgatcccccacgcccagccaacacaaaacttctgatgctctgttttctcatctgtgaactggagctaaggctaagtggtctgtctgtttaataagagtttgaatcagatggcctggcatgaagagtcactggcctgagagaatgtcaggggcatttgtaaatgtgtaaagggctgaaaaatcctgagggattattattattgctattgttgttattattcacagacacatccaacagccattgtctgcctccttatctgtcatgctttctgcacgagcgtcagcctgagcttcaatctgtgtgtatatctgcagcttacgtccttgccacccctccagaacccagtttcatccttgtaggtttttccgaagcaggatttgcacaagtggcgtgttttcttaagtatttattttgcaggccatttactcggcatggctatttttacagtgggtaaggagcaaggctaaaaataacttagctcataaccagacaggttctgcatttgacatttacgtggaattcatttgcatctcatttgttcgcctttctgtttaacaggtagaatgtaagaaagctcagccgaaagaagtcatgttcccacctgggacaagaggccgggcccggggactgccttacaccatggacgcgttcatgcttggcatggggatgctgggtgagtctggacaggaccgcaggtcaccatggactgggagggctatggaggcctctactcccaactgggtcacctaccagtggggcaaactgcttcacctttctaagcctcagtttccttgtctgtagatgaggatgataattccccgttccaagacagttgtgatgattaagtgtgggtgtgtgtgtgtgcatgcatgtgtgtgtgtgtgtgtgtgtgtttgtatttataatattgccccatgcctggcttataggatatgttagactattttctctcttttccatctccttcctcaaaagaaggaaaagtccccctctatctgcctcagccctctcatctgagtgggagttcttaagatgtaaggactcctggctgacttgacttgtgtgggctaaggctacgttttctaaaacttgggagaggagggaagtggtaagggtgggcgataatcctgtctatttaaatgattaacatttttctcttgggatatcaaaatttgcatttaaatggatgttttaaatagcctgttttactctttatttgccaaaaaaaaaaaaaagatgaaagacaaagtgtgtttgttctgactaaaaatgatttctcctggcttttagagaaattgagttgcatattatgtccctttccttaaaagtatctctgtccgtcctgcgtagataattgaaaatcttaccgcttaaatggcatgaaagatggagaaagcagtggagatgcgtaatggtgtaggtcgcaacaataattagaaatttaaaggcgagagaatggtattttagtgcaagttattgtgtgtcaggaaaatactaattaagtgggataaatggtagttaatggtaaaattccattcaggcacatgagctgtctagtgttaatggattttcatttggtttggctaagagtcccacttctacattgtttgataagccctttctatattttcagatttgctgctgtttaaatcacttctggcttaattttaaatttataaaacatcttgtggtctgacaaagaattgtatctacttgtctgaggaaataacaagggcaggtaaaactattttgaggaactttatgaaatagaaaaagatgccaggagaatattaaaaatggccatgatgttaattctcctcatatgaattttttaggcttaacagagtttcaaagagaaatcctattgtaatttttttaaattggccagatgtttctaaaacttatccctggaagaagaaacaagtgagaataaatgagaaaatgtttttaaaaagaggaatgagaaaagaccaacagtgagaatgtaacacaaagctacagtaactaaaacagtatggtatatgggaatgcaccagttgatagaaaagggtagagtctaaactaaatatacctatatttaagagtgtgattttaaaaatcagtgataattatttcctggttcactacaagataattccttagctcctcctttaaaaaataatttttattaggtctttatgttttatatcaaaagaaactctaagctggtagttttaaatggtgaaatcaacctgaaagaaggagagttgagctgagtgcagtggtgctcgcctgtaatcgggaggcttaagcaggaggatcacttgaggccaggagtttatgagccagcctgggcaacatagcaagaccccctctctacaaaaaataataaacattaggctgggcatggtggctcatgcctgtaatcccagcaatttgggaggccgaggcagatggatcacctgaggtcaggagttcaagaccagtgcgggcaacatggtgaaaccctgtctctactaaaaatacagaaatcagctgggcactgcagcacgtgcccgtaatcccagctacttgggaagctgaagcaggagaatcgcttgaacccaggaggcagaggttgcagtgagccaagattgtgccactgcactccagcctgggtgacagagtgagactctgtctcaaaataataataataataataataataataaacattagcggggtgtggtggcgtgcacctatggcctcagctacccaggaggctggtgcgggaggaaagcttgagcccaggaactctgggctgtgcagatttggtgtccccactaaatttggcatcaatatggtgacctcctaggagtggaggaacatcaggttgcctaaggagggtgaacaggaccaagttggaaatgaagcagcacaaaactctgtgctgatcagagtgggatcgtgcctgtgagtacccactgcaccacagccggggcagcatagagcatagcaagacctgtttctgaaaaaatataaaataagaaagagttgggggccaggccggtggctcatgcccataatcctagcactttgggaagccgaggcaggaggattgcctgagcccaggaattcaagaccagcctgagcaaaatggtaagaccctgtctctctctttcttttttttcttgagatggagtctcgctctgtcgccaggctggagtgccgtggcgcgatctcagctcactgcaacctccgcctcctgggttcaagcaattctcctgcctcagcctcccgagtagctgggattacaggcgcgcgccaccacacccagctaatttttgtatttttagtagagacgggatttcaccatgttggccaggatggtctcgatctcttgaccttgtgatccacccgcctcagcctcccaaagtgctgggattacaggcgtgagccactgcgcccagcaacgctgtctcttaaaaaaataaataaataaaagcaaaataaaaataagaaagagttgagcctattaccacctactgggttttagagtcttgaatttaaaatgagcataaaggccctacagcataaaatggaagaccttcaggatccaacttcaggaaatttcccacctttctgagtctaacttggtaccctctgcatgctgggaagaaggaactggttttcatctgggagaagcaaaggtgtgaagcggagccagctcaggtcctgtcagttgacaaagagcaaagagtgctcagcctcccagactccgagcaaaggctcaggcccacatctccataatcacccaagcagggatccctgaacagaagggtacctaacatttcatcatgggaacacaggtagggaggcggggcaggaggcaaggggcaagagcacctgctgcgtgaccagccctgggtagccttgggacacagtgcttcacaagcagatgtgcttcctgccctccgcgagcttgtggtctatacagagagcctgatgcgtaacatgaattgcacagatgcctgatgatcatcatagagtctgggggtggttggagagcacgtcatgaggagtggaagccagtcttaggaatcagggaagtggcatttcagcagaaatgagaaggatgagtaaggcaggggccttccattcggaataaacaggcttggaacacgaggaccctactgtgggaccttgagagccaacgagcctggccacgtgtgtgtgggaaggtggggagaggcaggcccaggggctccagggttggctttgcctgcagctcgtgggcagacccgagtggccccttcctgagagcacctactgaggtggtaggagacagcactggtccctgcgcttatctggacagcatctgaacagcgcctgctcgctgggggatggatatgtgatgcctgccaggagcttactcatctgcccagctcttcccccgtctactcacagttcaagttatgacttccccaagccacagtaaagaaggggctgttaggtaaagatattgttgcagttcagagcctattgttcttgagttataacctccgcagccccaccctgctgctgaaggcctttgccttttgcctgctgtagctgtggttgtgcctaaccccagaccctatccagcccaaccccaggtcacagaggcactagtcttcttctaaccaagtagagaaccctttggatggaatggatggggtcagccctagccagagcagggctccagcaagggaggccgtgtggtccagaggcaagagcttgggacttcagaatcagcagacctggactcttcactctatcagctgtgtgatttggggcaagtggcttagcctctctattcttcatttatcctacccatggggtaataatcttacttcatggggttgttcagggataaatgcaactgtatcttgcctggtaaatgctgtatttagtctaatctgagatgccatggctagtaagatgtatgttcatgtactcttcagaaagaaaaaatatgctattaattaaaccgcataatgctttcttatcacattggctgcaagatagatcccactttcagagaagttaaagtgtggaaaagatgtgtgtcttcaaatcagcaaggtatcgtagcatgtactcaagctgggagttgttattaacaaggcactaggaagccctaccacttggacttccttaccacccaaggctgagaacctagctagactcacgaatgtgacctgtgctgtggcaactgcggcctctttctccttgtggactcccagcccaaggagtttggattattcttgagtagccaccttctgacaaagatctgtgtgctggattccaggcctcatcagccctgggccctcctgaatttcccagtgactgtggtgaggccatccatatgcactgagcagggtctcctaagatgtcccaaaatgtgtccttcagccaggaaccagctcagccagaggtccaggcagaagggatgaatcagatgcagtgtcaagttgtatctgaggagatacaggcctccccagccatcacagagcctcctcctgagccctctgtaaagcatccactgggaactccctgggctgccctctgttttgcccattggcccagcttggccctctgggtctatggactctctaagcgaggagactgccatttgctgtgctatgatggaagcccttgactctgtcatcaaagactgtttctctttcttcttgcttcttccctcgaaagtggtagtgtagcatcaggcagagtcaaatcttttggtagcatggcctgacatgaccccatcagttacatgggtcaccatctccaccgagcactatgcctgcatattagtcctggaagcactaccatcctcaccaacagcaatctggctgatgaacttgactcatgcagaaaaacattttcttaaagttaactaaccaatgaaattagacgaggtttccatgatttaaacttttattattgaaagagtggaaaaataaatagcacttctagggattttttagaagtgagactataaaccattaaaacattaaaattcattcattcaacaaatatttattaaatgagtacctactaagtgccaggcactgttctagatgctgaaaatgcagcagaaaactaagtctctgacttcagggagctgacattctagtgaggagtctgagacaaccagcacactggtctgcaaatgactcgaacactgtggaactaatttttaaatatcatttaagattttctccatactctgggtggtctcttcagagggaggctgataagcatatagttgcacagttattctatcttgatctctgttgatatggctgcagacatccttggggaaaacctacacctgttttggttttagcttttacagcgtttgacagaatcacagaataatcaacccaatgggaattccttaaaaggaatgtagaagagaagaggaggggttatccttaggccaggtctcccacctttgagccggacaaaaccagagtcacctaagactcttaggaaaggtcttttgcaggtcagtgcagtggctcatgcctctactcccaggaggccgaggcgggcagatcacctgaggtcaggagttagagactagcctggccaacatagtgaaaactccatctctactaaaaatacaaaaattaacaggacatggtggcgcatgcctgtagtcctagctactcgggaggctgaggcagaagaatcttgaacccgggaggctgaggttgcagtgagccaagatcacaccactgcactccagcctgggtgacagtgcaagattccatctcaaaaacaaacaaacaaaaaaacagaaatggtctcgtgcagcccctcagactttgcggcaccgcaccaagaggtgcccacagttatccagctcaatgtgatagaatctctttcatttttcttaatgaaggtgaacttaataaaagcaaacacatgatgattgttgatatattttatttctctgagccttctctgccacataatcccactgcctttaactttcttggcctcgttgggcacatgctgtttatttaacatgctgatacgagtgttagagaaatagcacattgctgagccctcaaagaaaagcttcaccctagcaggcccagaaacgaagagaggctgatgatcagctaaagcacgttagccaaaagcattcttaggtgcagtcgtactgagaagccccgcgtgaagtcctgactcagtgttccctgacattaagccccctgaaatgtgagcaaaaaaaaaaagtatcgttaagaacaggcactaggaagctgtaatctgctggcgttcactaacagatcaaaagattggagattggctggaacttaaaaccacatatctacactcaatttcgacggggatctggctttcccaaaaatatctgtttaggttattctcaaggaagtgttcctttgtttagccgcttcctggtggacagaggaaactcagaattcagctcttcattgtccctgtagagcagtgcagtccaatagaacttcctgcaagggagggaaggtcctgtctgcactagccaatatcactagccgcctgtgcacggtagctgctgagcccttgagttgtggcttttgcgaatgaggaactggagctttcattttagataatttgaattaaatttaaattggacggcgcaggtctggaggagcccctgcaactcagggtgattctgggggcaaagcatctttgtagactttagccttcgcgtccttgcctaggaaggactcttggcacttggtgtttagtctgtttgcagacctcatggagccgatgaggtgccccaggcagtgctctaaacatcacgcagcagatatgtcacactctggcagttccctggataaacagccctgtctcttgtctctttcaagtctggggcctggtgggagccgttttccatgactctgagtagctgagtaacagagcccgggagaagatgagtcatggacccgtctagaagggaaacatctctagggttgcagcaaagatctagaaccagaaccacagttttgacaactttgtcagcatccccaaaatggggactcaaaatgagctcagtggcaaatccaaattctattgttgatttctgtatttttgcttctgcaatggaaagccgatctgcaagagaggtggtcaccctggcagaagccttgatttttttttactttagtgacaagagataattactgtgggattgatcaggcgtccagagtattggagcagataaattgtgcagtggccagtgtgggaggggccaggctgctaatggaagtggtggctgggtcatcccaccgtaatgtggcttgacggagcgtctgcacgggtctgctgtaatgtgctattgatatgcagccagccaatttcccccgtgtggctggggctgtgaaccattcgagcagagctgggctgcacagcagtaaatgaagaggaaaattgaagtaatgttgtattataaatttatgatttcatctgcctgacctagaggatgttcggcgattgggggtggagataagatcccccgctctggcagatgccgaattctcatctttgtggtttgggagactatagtattgatgtgtccaggaagagtggggtgagacccaaagttggggtgaacttgaccatgcttttcttctttctcgttgaagccttgtaggaaagccaggaagaaagcaggtataattgcattgtatttgtcacctaagtgcagggagaaactggctgctctgccacttcccaccctccctgagggaaggtgacacataggcttatgcttttgctgtcagattaacactaaaatatttaagacccccagctctgaagttagaagcaaaggagccatttttcatctggaaagcccctaggcagccatgacttggctgtttgcatataatccatttatcaatattgttgaaatcatggtataagaaatctagtacaagatctgatttgctagcaggtgattaatttggaggagaactgagctgcctagccacgaaataaatacgaaggaaggcgccagtatgcatgtgtccatttaaggcatctgagccctggcctttgctgttcttccttccttctttctccgtcgggttgctgagctcaacatcccaccgggctcctgctccttagctagcagtcagtgcagagctgctgggtccttctgcctcgcttgggcaggcttctgtcaatgagtcaccaagcaccgggaaataagtgcacaggaaggagcaggtggcaagaccctgtggaggtagagacagttccattcagtgagtgagctgtgactgcaaatttgggaaggttctgggggaagcaagggaaaggagccacagctggtctcactcaagaatttgggcacgtcactgttgcaagggacccacaaggctttctacaggtgacaagactaagctccaagagaaaaaggaagactcctatcttaagtcgggttgctgtcacagattaccatagacgaggtggcttatgaacaacaaacatttatttctcacagttctggaggctgggaagtaaagatcaaggtgctggctgattctgtgtctggtgagggcccgcttcctcatagatggccccttctaaccgtgtcctcacgtgttggaaggggtgagggtctctctgtgacctctttgttaagggcacattcatgagggctccacctcatggcctcatcacaccccaaaggccccatctcctaaggccatcaccttgggggttaagatttcaacatagaaatttgggggaaacacatacatcaaatcataacaacccccaagggcatggttgggggccagaggcaggactggaacccaggtctcctgacttcagacccgtgagtttctgctctaggtctggtggcagatccactgatcctaggcagaggctacaacaccaacatccaccaggaagtgagggacggtggagcccacctccaaggcacaaaagctctgagtaggcagcaggatgacaagcaaactctgactcctgttgccgagtgcaggcaaagtggaatttagtaagggatccttttccattagccctcacttgcagggtcagaaagtggtcagtgtgatgtatgagaagccactgagcaggtgggtgataagaccccagagctgtgtgtagggatgtttttaaagggtttgtgtagaagggcagagacacccgtggaaagtgtcactgttgccctcaattgctggagagcctggaggctgtcataagtccactcatcaaagtaattgtttgccagtgttttgataacaagcaacagaaacaaccctggctgctgtaagcagcaaaggagattattagaaggagcttgggcagtgctggagaattgacaggatggctggagaacaggactcagaaaacaggcaggaactgggggagctgggtggtcagagccccagccctagccaaggggacaactcaggaatgacctggtcagggggccactgttgccaacactggatgccagattctgctactgacaccagaataaattcggagccagtccctcctcctctgccctaccagctccagaggcagatcctaaggagggcttccgtctgtcgagcccaggttcacaggcctgcctcccagcctccagccccaggaagagccctgaggccttctcagcttctgtgatggccgggggggtgggcctctctccaagacttacacacagggagaggctcaggggctgggcagccaaaaaatgaccacagacattcacctccaaagtcaaagcgaaagtcacgttctcggtggttgggtggccgtggtggcatcttaagagcaagaatgtactgaggttacatatacactgagtggagggaggcagagtgagcctgacccatacggccttcatttagcctgaatcaggcagggacttgaagaacgaagtggcctgagcagccacaatgactccctgagagctgaatgacacctcacatcactgggggttagtgacagatctgagatggtcacaccagcccctggacttgccagctgagtttcttgtgtgcccagtggccagcccagtggcagtttctacaagtgtctttcagtgaaccactcaccccctagcttgcctgctgagacaggggtctagaaacaatacgcttgtggtgaaacgcccatccagtcacacggcacggggctcctgagtcggagctacactttgtggtatgcatcttaacacatccagcctctcaccattctccaaagatcttggcacctccgtggagtgtcaaaactgcagtgtgggccatggctcatcaggcccagcgttttccagaggcccagggtgagccctgagtttggccgctaaactgtgactcctgagttcgcatgctctgtctggtgctggctctgttgtccactgccttgggaggatgcatcacgaggactttaatctcctactgtcaatagctttaaggtaaagtacatgcagggtaagctctccaaatgtcagagccaggcgcaggctttgtgtttggtgctgatgcatggcatttactctgaaggttcaggaaagtacatgggctttgcggggtctggctgcccaaatatgggttaattagcaacagctgacagcagcgcccccggccacaggagagaggtgacccagacccttaataaaaaaaccctcatgagagacaaattattctgtgaaggaaaataactcaggctttcctcattgccaccctccgtgagattttaccccagacctgaggcggctgtactaacaggactctgatctttctctttgtgttcaaggatatcccaacttcgtggcgacctatggccgtggctaccccggatttgctccaagctatggctatcagttcccaggtgagtggcttggtctcccagggctttggaagcacaagaggtgggctgcatttgcggggaggtgagaggacccctaaagagaatgcatttcttacatgcatccacttgaaaatgacctatacatgataaatttcaaatccactgaagttcaaggccaggatgcagctcagagtttttgattaactcaggtataactcactggtgccgggtatttgagaacggcagcttttaaagggaaagcagaacggaggcaggaggcctccctgtgctcacctcctttttctgaagcctcttccgggttttttctcactggggactgaactctaggcccagggctttctttcaccctctaccaccccttgcccgcctccccgctccctgtgtccacctgcccaatgtttgatgtctccccgcccttgcttcctttcctccacccctcctcctcctgctccgtcctgactgctgtggcttcggcgtccttctgggctgtgttgatgttgagctgctaggggttgggactgctgtccatcctgggtgagctgtttagattatcctttccctctgcgtgggtatcaagacttgaggcagagcccatggtgatgcccgccacatgccagggctgctccagctccaactccaggtagctggcaggcctgggacctcacctgggagaagcagcgaggggaaacatggtcttgtagggatggggtagggacaatgaaggaagcgatgttttacagggtatgcttttccccagcctttctcaaatctggagtacagataagaatatattggggtgtttgggggtctccatgtgcaaaggacagccgagattccagaggaggtgtagggacagagtcttgtcccctgtgggttttctgctgagggaggaggctccctggggagctgggctgcaggcggagtttcacccctgccttgtcgtcatgcctagacctggaggtctgggagtgtcagggtctgagatgaattaggaagcaaagggagtgaagacgcgtcgctggaagatggcgccctgacactgatgacaggagggcagagtgagggcttggcctggtctttgcctcagaccaagcattggggcgggaagggtgtagttggagagatgaggaggcatttgggggcacctagagccgtgctctatggcagacagatccttcaaccagcggtggaagccccaagctcttgtcctgtctccgataccacctggccaagtggccatgggcgggtcactcagcttctagggccttacttctctcttttggaaaagggggtctacgaggaatggtctttggggtctgtgcccctctccgattgtgtgggtcagagggtgcagggaaggcaggcacagaagcagaagtccaagatggaggagtttgagtgcaggtggctcccccaccagtgtcccctggggctgggatggttccccatctgggaggggcctcaacaagactcctcggcccgcactaaggaagccgtccccaaagatgccccccagcagcaggctgcttcaggatggccacaggctcccagacctgaagaaaagaagggcacatgcaagaaggaccaccacaagagaggccagcactcaaccagccactgtcattagactttcccatttccaggcagagacccccaccaggcacaggcacagaggtagaaactccttctgaaggggtcacagtacgcaaggggtaggacctgcatttggaccaggcggtctgggccttaactgccaccctccaccatctccctagtgtccatttttctggtacaataacactagccacaaagagctactaaaacttaggtttaaattaaagttggctgggtgcggtggctcacgcctgtaatcccaacactttgggaggccgaggtgggaggatcacttgaggtcaggagttcgagacccgcctggccaacatggtgaaaccccgtctctactaaaaatataaaaatgagccgggcgtggtgcccggcatctataatcccagctactcgggaggctgaggcaagagaatcacttgaacccaggaggcagaggttgcagtgagccgagatcacaccactatactccagcctggataacagagtgagactctgtctcaaaaataagaagaagaataagaagaagtaaaaagaaaatttcagttcctttagaaacactggccacatttcagtgactcagtaaccatgtgtggcaagtggctattgccagcacagaatgtagaacagtcaccgtggaaatttcttacgggctggtgctgttccagtgcctaaaggaagagggctgttactggggggtgcacggtccacacactcacacatgcgcaccactccttcctggagacacccatggggtcagtgtccctgtgcttcattctctgccagtcttgctcagcccagaagctggtggcttttcctctcacttcctcccctcgcttcccctccaggggatgacaggtgcaaaggctcacgcatctcggccctccaggtgcagcactgatctgtgcactcagcctgcacaacctgctcccctccgtaatcaggctgccattgcccctgagtgtgatgctagtcccaggaggacagagttgagggatcttaacatggaataattgggagaggacatcaatgtggaccctatgctaaggcccctgtctcatcagagggcctgccccggggcccccatgagctggctcaggagacatctagtagaactctgcctccatggcctgcatccctgggcctgccccaggcagacggacatgcagcagtgaccagattgaggctgggcagagtgagatagggtcccctgggtgcccagcccttcaccaaagccaagactttgggaactgggggggcgggggatggactgggctgcaggaaggaggatagagtggggttggagtgtttttgcccagggcccatccgtttgtcatggccacagtccctgcagcttaatacaatcaggtgggtttgaatgggacagaaatcaggcattacaatgtacagacagcagcttcctgacctttgggagttagctgccctgttctcaaccatcaaacttttatttttccatccttcccaccttcccactcactatggaagcctcttgattctcttaactaatggccagaaaggggccaccagtggccacaagagtaaggttgcctgctctcagggagggcaagagtggagtggccctgaactgggaagggtggccccatggctggggccgcccaccccactcatctgagaagccaggctagggtcagagtctattcccctcctgaccccctcccaaaggatatgctccttgtggagtgttgggtctgtgcttatcccagatgcctccccaagcagccaaatgtttccagacacaaagcctaggtaggtccatgtgtcattccagtcaagagcgcagggagtagctgagcccctctagaaccaaacttgatgactcctggagccacagcctcagggccagggctacagagaagcttctggatgccctgacttccatctgtcacctcatgccaataaggaaagtttcgggtggatctggccgaggcggctggggtacagaagggggacccagagatggggcagcccagccctctgccctctcctcatccccatcaggtagattctgcgaacccctgccatgccccggggatcctgtgacttcgtgacattacacagcagtcatgtcacctcccaactatcctgatgttttctttgtggtctttcttttcagtgtcctcactgtatgcccactttacccacttcccacctccggtccccctcatgctgtgcatggatcccgaacctctcccagcccctttctgagtccccctagcagggccatgcaagacagctagctgggagaaatgaaagcacgcccaggtcctagagagctccgagactcttcatcctggctgttctcactcataaaccaggtagcctgggtcccctttcaggaagatgcaatctgatcccctttatgaagggtcctcctttccacctggacttaccctttctatgaacatccatctcatctggttgggggtgcagatatcactcttagtagagcctcattctcaccatgtgacatggggctgcacggaccttcctgggccacacagctggtggcaagtggcacctggctgtgcccatcttcagaattctgtcagaataaatgttcctagagaaggctagacactggatagtttttagagtggggagtagttcttttctagaaaggctgggtggtgaccaaccactctgggaacagctccttcttcccacatccaggtgtccaccccagcctggaatttggatcaggatcccgtcttgaattattatgggttgtgatcagggatctcccctgcttcctctcttttccccactctggacttctcatttcagtttaatctgttaatttctgttcttatttcactttgcagactatttgccggtttcacaagacataatttttatcaactagctcttaagagaggcatagcaaagtgggggttgctaccatttctagagagagaggacacagtcccggcctgggctgcccccgctccagtcaatgctcactgaaagtctgtcttagctgcctgtttgaatgactgttctttttctcatttttaattcttggactcatgtcctcattgcttcactcaattaaaaaaaaattattctccagtcccctcccactttgcttcttgtatgcattgtgaccgaccccacttcctcagaatgtaacggggccagagggaaacttctcacaaacttcgtagagcctcctcaggggaagctaggaagaagacatcaaatgtttttaagtcatgaccaaacaggcttgttggggacatatcatggggtgagctttgaagtgctggtggtccagaggggttgcagatacgtgacttggagcacccgtgtcttacgatggacagtgataaaggtgaacacacagagacagactattctctaagaatgtgagaaacctgatctggaagaggagctatataaacactatctgactatctttgtcttttggggccagtggctgttggcataatcacaagcctgtctgtcttcgagaagggacagtggagtcatccaggtgctgccacatgacaggcacggtgggcaccgatccacagtgggccccgccttccccagctcgcctccctgcctgtgctggcctggccttgcctgctggcaccattggagtaggagggggtggaacacagggggcccatcctgatcaggccccatctcaaggttggcactcctgcccatcacccttagaaggatcttttcccatggcttgacttccttcatttccctaactgaaatacacccactctcttggaataatgacgtaccactcagttggaccctcaagagtcactgctttgtctgtgctggtagtttgtgagaagtgacccgcacgcttccatttgatgcatttgatgtgagtgaatccatacatttgaatgtcattgtccttgagaccctacatgtgcagtttggctcatctcattaaagatgcttgatgtaataattggttagtttccttttattttcctgcaggcttttccatgagtattatttttttcaaagaacaaatctgtatggcttttccccatctccatattttgttttgctatgaattgctttgctttggtgaacttgtcctagtatgcttgcctcacaaacgttttagccattgtgaattttcttcatctctgtaaatagttcatctgtgcttctccctgatgacgttttattttttttcccctgtaagcaaccgaggtagaaaaataaattgtttaccatggacatactgtgtgctgccgtctcttagcctgacagtgtcctgttctcgctccgggggaggtgaatgcactgaataaccagcaccgatgacagcctagtgcagtttctaaaagcatgcgaactccccctggctgccgcctgttcccagccctccctgcctcctggcatcccctgtacttgcttgaggtggtctgtccttgagcagagtggcagagcatctgcatgcgccagctgcacagtatcgccccgatgctccttcctccgccacggctcccctctcaagtgaaaatgccacacacatctggagcccctcacatctgtgcactaggtgtgtgcgccgtcttaccctcgcgcccacgggcctgtgtgtggttgtgcacgtggcctgctttcctgactccccagagcactgcaggcagaggaggcaccagtggacagtgggaatgttcttggatatgaagccggaggacctggtttccaggtcccacttggccacttagtagccatgtggccttgagcaagtcatgtatccctccaagccctgaagatgatgaaagtgcctagttagttgagttgttacaattaagggataacatgtgcatgaatgtgccttgtaagttggtaaatgctataaaattggaagttttagaaatagtgggcactgatgttcttactaagtcagctctccagagtggttttcccatttttatcccccatgagggatctgtcatcagtgaaaggaatgatacaggattcctacgtgaagctagagacttgctaggacttcctccccaccgtcaggccccatcctttctcttccctccttccctctcttccctcttcattttgctatcaccaggtactgaaataggtaccagacatctggacatgaataagactgactccttcagatgcttttgggctacccaagggagagagaagcagtgataagaccaattgaacatcatgagacaggcacttcactagagagagggaagctctggccaggcgtagtggctcacacctataatcccaacactttggggaggtcgaggccggtggattgcctgaggtcaggagttcaagaccagcctagctaacatggtgaaaccccatctctactaaaaatacaaaaaatagcccggagtggtggcgggtgcctgtagtcccagctacttgggaggctgaggcaggagaatcgcttgagcctgggaggcggaggttgcagtgagctgagatcacgcggttgcactccagcctgggtgacagagtgagactctgtctcaaaaaaaaaagagagagagagaagctctctatgctgtaagggtgcaagggtgggctgcttgttcagagtgccctctagagaaggtgacaccagaactgggtctcaaaaagccaaatagaattagccaggtaaagaaggaaaggaagtatatcccagacagagaaatgacatgcttagacattgaatcagatagttttaagaaagaagagaaacacaaaagtaataagacacaaaataataatggactaaacaaaataagaattcatttatctctcatgtaaaagaagcctggatgtggctccataatactcatggtctgggtttcttctctactctcattctactctcttcagcataagactccacctcatagtctaagaaggctgctcaaactccagccatcacatgttcatcccagaagactacatctcttccctttagtaatgcttcctataagtcatgcaggacattttgcttagatcccattggtcagaacttggtcacatgaccagtttcagctgcctggaaacctcagaggtgtcttttttccaggtagccatgtgctcagataaaaataaaggattttggtactaaaaaagcagagtggaacggctactagtagacacttagcaatttctgctacatacctgagagaggaaacattgcaggtcccagggactgtgagtagttcagtgcacagggagcttgcagaagcatcttgggtgggaggagatctacaaggctggagccatggtggcctcctgagtcaagtttaggaagttaaatttgatccccaaagcacgtgaagtacttggagatgatttcacatacagaagtgatgtggtcgaacttccatagtgagtcagaggggtttggagaagtgggaggccatgagggtgagtctggaggattgtcccttctctctgcaccccatctcctctccacctcatcctctcttggctccatccctctctccctgcgtggggctggctggtggttctttgagccctgcagttctatgcagttctatggccctaaccgccaaaaggcctctgggccaatattttggcaaccaacagtagcctcagccacagagcactcggggtggccaggaggccaagctaacgtgtcatggcttggtgcccaaacctccctcccaggatactgtgtgcaaacggcaggggcagcacagctccccaggcagggagacccttccccagcctgctgagcttgaactctggttataaaagtgccagtttgtgctcctacctcttcagcaacggaaaacaggtttgctctcgggtcctgatgctgactgatgagcactggattcctggagcactggcttcagaatgatgttgaggccaagtcctagctcagcagaaaggacggctgtgattagcgatgtggccgattgctgtaccaggaaggactcacggcctgtctgccatgtagcttgccttctatattcctgtccaatgatggttcttcggcgccaggtgattttccatcactctaaaagatacgtgggggagtggggagggttggtgtctgaggagagggatctgctagctcagggatatcctgttcctctggagggaagccgctgtagtccattgtctgtagggctgcttgcaaggtaagcttcagtcaagtcatcaggtctttgagcaaaggcagaggcttgtggtccgtcttagcctgaggggtagggcttggatgtggaaatcagagtgaaggggtccaagttctcaggaggtggaggagctggcgttagcaaggtgaccgagagagaagccttggccataggcaaggggctgcatcctgaacctgctgtcactcacctgccagatctgtctggtcattgacattttgcaaaacattcaaaaatgctgcagctgccatgctcaaggcctaggaccctggctgggagtggtaacctgggccaccggggggagcaacttcagagcccttccatccaccccctcctctagcccacccaagtggcagagacctctgcggtcagtccccactcaggagaggcgagaccccggggtgcgctcagggagctgcttcctgccttggcgtctcctgtgtcctgctctttctggcctagttcagtgagagcacagagttcccctccccaggctctgtaatcttgtctgcggaggcgattccaggcttgcctggacggcccctcattttcctgtaagttgaaactccctctttcctcctgcttcagtttttaagggactgtttcctcatctcctgccccagaaatgccctcactaggacccctgacagaccctcaggctctgcctggtgcagtgcttctggttggcttccagaatggagcccaaccagcgagcaatggctggtttcttgctagtagggacacagatcttgaaatatcaagacaggctagtcagtttcccaggtaggctgccataagcatggactcgtgcgtccagggaccccagctagatgctgcagcactgtaaacagaaatgctccctgtcaagaaaagccctcctgacacagcagcccccacacatctgtctcatcaccagccctctaatctgaacatcccttcagcccttgagcctcgtctctggggattaccccttcccagattagatccacagccagatttcaaatcacaagcgagctccctcatggccagcccactcctgcgccacctggccctgtgtatacttggggcctatcctctcatttgaatattaaaggcaagcttagacaggaaagcatgtctgctgctttaaaagaagacagagaagtaaaattcagtggcacaccccaaacccagaccgaccgcggcacgaggctcgtcggggctgtggatatgttgccacgttcctccctcggcgtggaaaatcaggagttgactctattcccagatgaaagcagagcacggtgcctaataggcacttaataaacgtttgcagaaatgaattggagcaatctgaattgacgagaattgtgggtttcacttccgatcagctttctgtgcctcttgaagctcctctgcataaataaacggaaatgtgactaagtgagcgctcagctccccatggcaaagcccagagccccgtgtcctcaggcaggaagccaggatactgagttcttgcccttagcttgccaggaaaataaggccatctctaggcctcggtttccccatctgtcaaatcaggctattgatccttcctcacaggttgttgagagggttagtcggaccgggaatgatctagtgctttagaaaaggttagtgtcatgaccaaggaaggcaacccggcccaaggagcagagggccccgccagctatggcaggatggcagcagctacagtgagggaggctgcaggtgaccccacacctcgtcctctgtggactgaggccccgtgcccaccagatctcattttcctccactccccacctgcttaggtccctgtaccaccagccttgcaaagtccccattaagtctgctagcaggaacttaatcacctttcttcaagcccttcagttttcatttccatcagcaaaaacacgtgaaaggctgcaacttaaaaaacaaagcaacaacgaaaaacagaaaattactcagcatgtgaaattctaggcaaagagcagtgccaggcctgaggttcgggtagctggtgccttctggcagccaaggacaaagcagaaggcaaagatgtgtccccccaccctctcctctccaggctgaaaggaatcctgcacagagacttttttgcagagcccaggtcagcttgaatcccctgcccctgagagaccccacccagctgggtcactgcctctgctctctgtcacttcagttggggcaaaggcacattctctgcagagagctggaaatggtcatcagcacccgacccgagacagggcctcctggggcacaagttgctgagcaagggtgcaaggaattcagagcctgaaggagcatcccacgtgcggccagatgtgttcctgagtgattggagcagctgcacagggtacagagggagccgttgactctgctggacagccttcaggaaggggtgaaaacttagtccattctggtgaccgtaatagaacaccatagagtgagttgcttataaaaaacataaattggcaaggcacggtggctcactcctgtgatcccaacacattgggaggccaaggcgggagggtttcttgaggccaggagtttgagaccagcctgggcaacatagtgagactctgtctcaacaaaatatttaaaaaatatttaaaaaattagccaggcatgggggcacacacctgaaatcccagctacttgggaggctgaggcggaaggatcacttgacccgagaagttcagggttatagtaagctgtgattgtgccactgcattccagcctgggtgacagaatgagaccctgtctcaaaaaaagaaaacataaagttatatttctcacagttctggaggctgggaagtctaagatcaaggtaccagcagattggacatctggtgaggaccacttcctggttcgtagactgccattttcttgctctgtcctttcatggtcaaagaggtggccagctctctggggtctcttttataagggcactaatgccaatcatgaggactccaccctcatgacctaatcaccttccaaaggccccacctcctaatatcatcaccttgagagtgaggatgtcaacatataaattttggcagggacataaacattcagaccatagcgggcaacatccgagccgagttttggagcacgcacagaagttcgccaggcagatgatgagggagggtattccacctagagggccagcaggaggcccaaacacatgatgtgtcttccctccctcgcattcctacctccatggattccccatctgggcagagactgtcctagtacttgggctgagacagctggacaataggttttggcattgggaagccagtgccactcttctcaaacccagggaatcccggacacatgctttgtgagccggggatgctgaccccacctgtgccataggaggctgttccccgactggggcctttatgcatacggctgtgcagccccagtgggctctggatgccagctggccagggctggctgcctttgaggtgggaaagggagaggcaagtgtagcctcctgttccttccactgaggtcctgctgccccaccctgagtctgagcagatgcttggctgcccccagggcacgcctggttttgcagggaaaggtgtgaggccagccccacagttcccttagtggggaacctgcttagggattctacagtctttct
